(19) United States
(12) Patent Application Publication
(10) Pub. No.: US 2002/0102638 A1
(43) Pub. Date: Aug. 1, 2002

(54) Nucleic acids, proteins, and antibodies

(76) Inventors: Craig A. Rosen, Laytonsville, MD (US); Steven M. Ruben, Olney, MD (US); Steven C. Barash, Rockville, MD (US)

Correspondence Address: HUMAN GENOME SCIENCES INC, 9410 KEY WEST AVENUE, ROCKVILLE, MD, 20850

(21) Appl. No.: 09/764,846

(22) Filed: Jan. 17, 2001

Related U.S. Application Data
(60) Provisional application No. 60/179,065, filed on Jan. 31, 2000.
(60) Provisional application No. 60/180,628, filed on Feb. 4, 2000.
(60) Provisional application No. 60/214,886, filed on Jun. 28, 2000.
(60) Provisional application No. 60/217,487, filed on Jul. 11, 2000.
(60) Provisional application No. 60/225,758, filed on Aug. 14, 2000.
(60) Provisional application No. 60/220,963, filed on Jul. 26, 2000.
(60) Provisional application No. 60/217,496, filed on Jul. 11, 2000.
(60) Provisional application No. 60/225,447, filed on Aug. 14, 2000.
(60) Provisional application No. 60/218,290, filed on Jul. 14, 2000.
(60) Provisional application No. 60/225,757, filed on Aug. 14, 2000.
(60) Provisional application No. 60/226,868, filed on Aug. 22, 2000.
(60) Provisional application No. 60/216,647, filed on Jul. 7, 2000.
(60) Provisional application No. 60/225,267, filed on Aug. 14, 2000.
(60) Provisional application No. 60/216,880, filed on Jul. 7, 2000.
(60) Provisional application No. 60/225,270, filed on Aug. 14, 2000.
(60) Provisional application No. 60/251,869, filed on Dec. 8, 2000.
(60) Provisional application No. 60/235,834, filed on Sep. 27, 2000.
(60) Provisional application No. 60/234,274, filed on Sep. 21, 2000.
(60) Provisional application No. 60/234,223, filed on Sep. 21, 2000.
(60) Provisional application No. 60/228,924, filed on Aug. 30, 2000.
(60) Provisional application No. 60/224,518, filed on Aug. 14, 2000.
(60) Provisional application No. 60/236,369, filed on Sep. 29, 2000.
(60) Provisional application No. 60/224,519, filed on Aug. 14, 2000.
(60) Provisional application No. 60/220,964, filed on Jul. 26, 2000.
(60) Provisional application No. 60/241,809, filed on Oct. 20, 2000.
(60) Provisional application No. 60/249,299, filed on Nov. 17, 2000.
(60) Provisional application No. 60/236,327, filed on Sep. 29, 2000.
(60) Provisional application No. 60/241,785, filed on Oct. 20, 2000.
(60) Provisional application No. 60/244,617, filed on Nov. 1, 2000.
(60) Provisional application No. 60/225,268, filed on Aug. 14, 2000.
(60) Provisional application No. 60/236,368, filed on Sep. 29, 2000.
(60) Provisional application No. 60/251,856, filed on Dec. 8, 2000.
(60) Provisional application No. 60/251,868, filed on Dec. 8, 2000.
(60) Provisional application No. 60/229,344, filed on Sep. 1, 2000.
(60) Provisional application No. 60/234,997, filed on Sep. 25, 2000.
(60) Provisional application No. 60/229,343, filed on Sep. 1, 2000.
(60) Provisional application No. 60/229,345, filed on Sep. 1, 2000.
(60) Provisional application No. 60/229,287, filed on Sep. 1, 2000.
(60) Provisional application No. 60/229,513, filed on Sep. 5, 2000.
(60) Provisional application No. 60/231,413, filed on Sep. 8, 2000.
(60) Provisional application No. 60/229,509, filed on Sep. 5, 2000.
(60) Provisional application No. 60/236,367, filed on Sep. 29, 2000.
(60) Provisional application No. 60/237,039, filed on Oct. 2, 2000.
(60) Provisional application No. 60/237,038, filed on Oct. 2, 2000.
(60) Provisional application No. 60/236,370, filed on Sep. 29, 2000.
(60) Provisional application No. 60/236,802, filed on Oct. 2, 2000.
(60) Provisional application No. 60/237,037, filed on Oct. 2, 2000.
(60) Provisional application No. 60/237,040, filed on Oct. 2, 2000.
(60) Provisional application No. 60/240,960, filed on Oct. 20, 2000.
(60) Provisional application No. 60/239,935, filed on Oct. 13, 2000.

(51) Int. Cl. C07H 21/04; C12P 21/02; C12N 5/06; C07K 14/435

(52) U.S. Cl. 435/69.1; 530/350; 536/23.1; 435/325; 435/320.1

(57) ABSTRACT

The present invention relates to novel proteins. More specifically, isolated nucleic acid molecules are provided encoding novel polypeptides. Novel polypeptides and antibodies that bind to these polypeptides are provided. Also provided are vectors, host cells, and recombinant and synthetic methods for producing human polynucleotides and/or polypeptides, and antibodies. The invention further relates to diagnostic and therapeutic methods useful for diagnosing, treating, preventing and/or prognosing disorders related to these novel polypeptides. The invention further relates to screening methods for identifying agonists and antagonists of polynucleotides and polypeptides of the invention. The present invention further relates to methods and/or compositions for inhibiting or enhancing the production and function of the polypeptides of the present invention.

[0001] This application refers to a “Sequence Listing” that is provided only on electronic media in computer readable form pursuant to Administrative Instructions Section 801(a)(i). The Sequence Listing forms a part of this description pursuant to Rule 5.2 and Administrative Instructions Sections 801 to 806, and is hereby incorporated in its entirety.

[0002] The Sequence Listing is provided as an electronic file (PTZ12PCT_seqList.txt, 592,062 bytes in size, created on Jan. 13, 2001) on four identical compact discs (CD-R), labeled “COPY 1,” “COPY 2,” “COPY 3,” and “CRF.” The Sequence Listing complies with Annex C of the Administrative Instructions, and may be viewed, for example, on an IBM-PC machine running the MS-Windows operating system by using the V viewer software, version 2000 (see World Wide Web URL: http://www.fileviewer.com).

### FIELD OF THE INVENTION

[0003] The present invention relates to novel proteins. More specifically, isolated nucleic acid molecules are provided encoding novel polypeptides. Novel polypeptides and antibodies that bind to these polypeptides are provided. Also provided are vectors, host cells, and recombinant and synthetic methods for producing human polynucleotides and/or polypeptides, and antibodies. The invention further relates to diagnostic and therapeutic methods useful for diagnosing, treating, preventing and/or prognosing disorders related to these novel polypeptides. The invention further relates to screening methods for identifying agonists and antagonists of polynucleotides and polypeptides of the invention. The present invention further relates to methods and/or compositions for inhibiting or enhancing the production and function of the polypeptides of the present invention.

### BACKGROUND OF THE INVENTION

[0004] Chromosomes store genetic information for living organisms and are essential for eukaryotic cell differentiation and function. Generally, a chromosome consists of one linear DNA molecule complexed with numerous proteins that are responsible for the organization of DNA into conformations suitable for gene replication and transcription. Other known proteins that bind DNA determine which genes will be expressed and in what quantity. Thus, the identification of novel DNA-binding proteins will have far-reaching applications, including, but not limited to, use in treating viral diseases, treating genetic diseases (e.g., cancer and cystic fibrosis), and the development of therapies involving the regulation of gene expression.

[0005] Histones:

[0006] The most abundant proteins associated with eukaryotic DNA are histones, a family of basic proteins found in all eukaryotic nuclei. Five human histone proteins have been identified to date: H1, H2A, H2B, H3, and H4. All are rich in basic amino acids, which attract and contact the negatively charged phosphate groups of DNA. The sequences of four histones, H2A, H2B, H3, and H4, are remarkably similar across distantly related species. For example, H3 from sea urchin tissue differs by only one amino acid from H3 in calf thymus. Interestingly, the sequence of H1 varies a great deal and, in certain tissues, is even replaced by other histone proteins; such as in the nucleated red blood cells of birds where a histone named H5 is present instead of H1.

[0007] The primary function of histones is in folding chromosomal DNA. Two molecules each of H2A, H2B, H3, and H4 assemble to form an octameric structure called a nucleosome. Almost two turns, or approximately 146 base pairs, of DNA wrap around this octameric core, preventing the DNA from tangling and also suppressing transcription in vivo and in vitro. In nucleosome assembly, an H3/H4 tetramer binds to the DNA strand first, followed by the assembly and attachment of H2A/H2B dimers.

[0008] The most widely accepted model for how histones fold DNA is the “solenoid” model proposed by Finch and Klug in 1976 (PNAS 73: 1897-1901). In this model, nucleosomes are packed into a spiral or solenoid arrangement, with six nucleosomes per turn. H1 proteins bind to the DNA on the inside of the solenoid, with one H1 molecule associated with each nucleosome. Based on this function, H1 histones have come to be called “linker histones”, and are essential for proper DNA folding (Thomas et al., Journal of Cell Biology 83: 403-427 (1979); van Holde and Zlatanova PNAS 93: 10548-10555 (1996)).

[0009] The histone amino termini extend from the octameric core of nucleosomes, where they can be modified post-translationally by acetylation, phosphorylation, and methylation, affecting their charge and function. Acetylation and deacetylation of histone amino termini have been correlated with gene activity (Allfrey, Chromatin and Chromosome Structure, eds Li, H. J. & Eckhardt, R., p. 167-191 (Academic, New York, 1977)). Acetylation neutralizes the positively charged lysine residues of the histone N termini, decreasing their affinity for DNA. This may allow the termini to be displaced from the nucleosome, causing the nucleosomes to unfold and increasing access to transcription factors (McGhee and Felsenfeld, Annual Review of Biochemistry 49: 1115-1156 (1980); Gross and Garrard, Annual Review of Biochemistry 57: 159-197 (1988); Lee et al., Cell 72: 73-84 (1993)). Both methylation and phosphorylation of histones also play a role in regulation of gene transcription (Dou and Gorovsky, Molecular Cell 6: 225-231 (2000); Lorincz et al., Molecular and Cellular Biology 20: 842-850 (2000)), although specific differences between the three mechanisms are not well understood.

[0010] Aberrant action of histones is known to play a role in numerous diseases. In particular, recent studies point to the modulation of histone acetylation as a treatment for cancers and other malignant diseases (Mahlknecht and Hoelzer, Molecular Medicine 6: 623-644 (2000)). Other disease states in which histones have been implicated include, but are not limited to, systemic lupus erythematosus (Ravirajan et al., Autoimmunity 21: 117-122 (1995)), graft-versus-host disease (Meziere et al., Clinical and Experimental Immunology 98: 287-294 (1994)), scleroderma (Martin et al., Annals of the Rheumatic Diseases 52: 780-784 (1991)), Alzheimer's Disease (Oikarinen et al., Neuroscience Letters 132: 171-174 (1991)), foot-and-mouth disease (Falk et al., Journal of Virology 64: 784-756 (1990)), chronic liver diseases (Kanikoff et al., Clinical Immunology and Immunopathology 7: 265-271 (1989)), pemphigus and connective tissue diseases (Kubokawa and Ishikawa, Archives of Dermatology Research 273: 149-152 (1989)), and Newcastle disease virus (Dahlberg and Simon, Virology 38:488-490 (1969)).

[0011] Chromo Domain Proteins:

[0012] The compartmentalization of chromatin in the nuclei of higher eukaryotes is well known. At the cytological level, this is seen in the individualization of chromosomes at the onset of mitosis and in the differential condensation of heterochromatin and euchromatin in interphase nuclei. When the normal organization of heterochromatin is lost (e.g., through rearrangement to euchromatin or by depletion of structural subunits) genes located within this region are inappropriately silenced. A family of proteins, identified by their prominent chromo (chromatin organization modifier) domain, function as an organizer of higher order chromatin structures within the nucleus, allowing for the transcription of inappropriately silenced genes.

[0013] The aberrant inability to translate genes may result in abnormal cellular activity and/or cell death. Throughout a multicellular organism, this could lead to a myriad of diseases and/or disorders, including, but not limited to, hyperproliferative disorders, neural dysfunction, infection, inflammatory disorders, organ failure, and death.

[0014] Y-box Binding Proteins:

[0015] The Y-box binding proteins are the most evolutionarily conserved nucleic acid binding proteins, representing a multigene family found in organisms ranging from bacteria to higher mammals. The human homologue of Y-box proteins is called YB-1. All Y-box binding proteins bind to the Y-box, an inverted CCAAT sequence that has been identified in over 170 promoters to date.

[0016] Y-box binding proteins are structurally and functionally organized into three distinct domains, a variable glycine-rich N terminus, a highly conserved nucleic acid recognition domain, and a hydrophilic C-terminal tail domain. No function has yet been assigned to the glycine-rich N-terminal region, although it is suspected to act as a transcriptional regulator. The central nucleic acid recognition domain is also known as the cold shock domain (CSD), which binds to the Y-box in the promoter of many genes. Although the CSD domain is highly conserved across species, these proteins have a broad specificity for nucleic acids, binding double-stranded DNA, damaged DNA, single-stranded DNA, and RNA. The tail domain contains alternating regions of predominantly basic or acidic amino acids, each about thirty amino acids in length, and is believed to stabilize protein-protein and protein-DNA interactions (Graumann and Marahiel, Trends in the Biochemical Sciences 23: 286-290 (1998); Wolffe, Bioessays 16: 245-251 (1994)).

[0017] Since Y-box binding proteins exhibit a high degree of primary sequence conservation, particularly in the central DNA binding domain, it has been suggested that they may have essential structural and functional roles in eukaryotic cells. In fact, a growing body of evidence indicates that Y-box binding proteins are involved in a wide variety of biological functions, including, for example, regulation of gene expression at both the transcriptional (Asakuno et al, Biochemical and Biophysical Research Communications 199: 1428-1435 (1994); Chen and Khalili, Journal of Virology 69: 5843-5848 (1995); Didier et al., PNAS 85:7322-7326 (1988); Mertens et al., Journal of Biological Chemistry 272: 22905-22912 (1997)) and translational levels (Tafuri and Wolffe, Journal of Biological Chemistry 268: 24255-24261 (1993)), DNA and RNA condensation (Safak et al., Journal of Virology 73: 10146-10157 (1999)), and DNA repair (Wolffe, Bioessays 16: 245-251 (1994); Wolffe et al., New Biologist 4: 290-298 (1992)). In addition, Y-box binding proteins are known to be responsive to many types of stress-related stimuli, such as UV radiation (Boulikas, Anticancer Research 16: 225-242 (1996); Koike et al., FEBS Letters 417: 390-394 (1997)), drug treatment (Bargou et al., Nature Medicine 3: 447-450 (1997); Li et al., Molecular and Cellular Biology 17: 61-68 (1997)), DNA damage (Ise et al., Cancer Research 59: 342-346 (1999); Koike et al., FEBS Letters 417: 390-394 (1997)), and interleukin-2 treatment in T cells (Sabath et al., Journal of Biological Chemistry 265: 12671-12678 (1990)). Furthermore, Y-box binding proteins also regulate degradation of the extracellular matrix (Dhalla et al., Biochemistry Journal 336: 373-379 (1998)) and may be involved in redox signaling (Duh et al., Journal of Biological Chemistry 270: 30499-30507 (1995)).

[0018] The expression of Y-box binding proteins is regulated by growth factors (Ito et al., Nucleic Acids Research 22: 2036-2041 (1994)) and Y-box motifs have been identified in the control regions of several genes which regulate cell proliferation and cell cycle progession (for review, see Ladomery and Sommerville, Bioessays 17: 9-11 (1995)). Further studies have revealed that Y-box binding proteins also mediate the transcriptional events associated with the development of certain cancers, such as osteosarcoma (Oda et al., Clinical Cancer Research 4: 2273-2277 (1998)), ovarian serous adenocarcinoma (Kamura et al., Cancer 85: 2450-2454 (1999)), nasopharyngeal carcinomas (Fung et al., Life Sciences 67: 923-936 (2000)), renal cell carcinoma (Tanaka et al., American Journal of Pathology 156: 2149-2157 (2000)), colorectal carcinomas (Shibao et al., International Journal of Cancer 83: 732-737 (1999); Morrow et al., Journal of Biological Chemistry 269: 10739-10746 (1994)), breast cancers (Bargou et al., Nature Medicine 3: 447-450 (1997)), head and neck cancers (Koike et al., FEBS Letters 417: 390-394 (1997)), and epidermal cancers (Koike et al., FEBS Letters 417: 390-394 (1997)).

[0019] Y-box binding proteins also mediate viral infection and transmission through modulating viral gene expression (Chen et al., PNAS 92: 1087-1091 (1999); Chen and Khalili, Journal of Virology 69: 5843-5848 (1995); Safek et al., Molecular and Cellular Biology 19: 2712-2723 (1995); Kashanchi et al., Journal of Virology 68: 561-565 (1994)), and function in the initiation of immune responses via the regulation of class II major histocompatibility complex molecule expression (Boss et al., PNAS 83: 9139-9143 (1986); Miwa et al., PNAS 84: 4939-4944 (1987); Viville et al., Journal of Immunology 146: 3211-3215 (1991)). Additionally, these proteins are believed to play a role in tissue differentiation during embryonic development (Spitkovsky et al., Nucleic Acids Research 20: 797-803 (1992); Grant and Deeley, Molecular and Cellular Biology 13: 4186-4196 (1993)).

[0020] Thus, there is a clear need for identifying and exploiting DNA-binding proteins, such as those described above, that may contribute to diseases resulting from the aberrant DNA organization and/or gene transcription. Furthermore, novel members of these protein families are useful as screening tools to identify antagonists and/or agonists that may enhance or block activities mediated by DNA-binding proteins. Although structurally related, these proteins will likely possess diverse and multifaceted functions in a variety of cell and tissue types. Blockers of DNA-binding proteins may prove useful as therapeutics in malignant diseases, autoimmune disorders, rheumatic diseases, genetic abnormalities, infectious diseases, and neurological disorders.

### SUMMARY OF THE INVENTION

[0021] The present invention relates to novel proteins. More specifically, isolated nucleic acid molecules are provided encoding novel polypeptides. Novel polypeptides and antibodies that bind to these polypeptides are provided. Also provided are vectors, host cells, and recombinant and synthetic methods for producing human polynucleotides and/or polypeptides, and antibodies. The invention further relates to diagnostic and therapeutic methods useful for diagnosing, treating, preventing and/or prognosing disorders related to these novel polypeptides. The invention further relates to screening methods for identifying agonists and antagonists of polynucleotides and polypeptides of the invention. The present invention further relates to methods and/or compositions for inhibiting or enhancing the production and function of the polypeptides of the present invention.

### DETAILED DESCRIPTION

[0022] Tables

[0023] Table 1A summarizes some of the polynucleotides encompassed by the invention (including cDNA clones related to the sequences (Clone ID NO:Z), contig sequences (contig identifier (Contig ID:) and contig nucleotide sequence identifier (SEQ ID NO:X)) and further summarizes certain characteristics of these polynucleotides and the polypeptides encoded thereby. The first column provides the gene number in the application for each clone identifier. The second column provides a unique clone identifier, “Clone ID NO:Z”, for a cDNA clone related to each contig sequence disclosed in Table 1A. The third column provides a unique contig identifier, “Contig ID:” for each of the contig sequences disclosed in Table 1A. The fourth column provides the sequence identifier, “SEQ ID NO:X”, for each of the contig sequences disclosed in Table 1A. The fifth column, “ORF (From-To)”, provides the location (i.e., nucleotide position numbers) within the polynucleotide sequence of SEQ ID NO:X that delineate the preferred open reading frame (ORF) that encodes the amino acid sequence shown in the sequence listing and referenced in Table 1A as SEQ ID NO:Y (column 6). Column 7 lists residues comprising predicted epitopes contained in the polypeptides encoded by each of the preferred ORFs (SEQ ID NO:Y). Identification of potential immunogenic regions was performed according to the method of Jameson and Wolf (CABIOS, 4; 181-186 (1988)); specifically, the Genetics Computer Group (GCG) implementation of this algorithm, embodied in the program PEPTIDESTRUCTURE (Wisconsin Package v10.0, Genetics Computer Group (GCG), Madison, Wis.). This method returns a measure of the probability that a given residue is found on the surface of the protein. Regions where the antigenic index score is greater than 0.9 over at least 6 amino acids are indicated in Table 1A as “Predicted Epitopes”. In particular embodiments, polypeptides of the invention comprise, or alternatively consist of, one, two, three, four, five or more of the predicted epitopes described in Table 1A. It will be appreciated that depending on the analytical criteria used to predict antigenic determinants, the exact address of the determinant may vary slightly. Column 8, “Tissue Distribution” shows the expression profile of tissue, cells, and/or cell line libraries which express the polynucleotides of the invention. The first number in column 8 (preceding the colon), represents the tissue/cell source identifier code corresponding to the key provided in Table 4. Expression of these polynucleotides was not observed in the other tissues and/or cell libraries tested. For those identifier codes in which the first two letters are not “AR”, the second number in column 8 (following the colon), represents the number of times a sequence corresponding to the reference polynucleotide sequence (e.g., SEQ ID NO:X) was identified in the tissue/cell source. Those tissue/cell source identifier codes in which the first two letters are “AR” designate information generated using DNA array technology. Utilizing this technology, cDNAs were amplified by PCR and then transferred, in duplicate, onto the array. Gene expression was assayed through hybridization of first strand cDNA probes to the DNA array. cDNA probes were generated from total RNA extracted from a variety of different tissues and cell lines. Probe synthesis was performed in the presence of ³³P dCTP, using oligo(dT) to prime reverse transcription. After hybridization, high stringency washing conditions were employed to remove non-specific hybrids from the array. The remaining signal, emanating from each gene target, was measured using a Phosphorimager. Gene expression was reported as Phosphor Stimulating Luminescence (PSL) which reflects the level of phosphor signal generated from the probe hybridized to each of the gene targets represented on the array. A local background signal subtraction was performed before the total signal generated from each array was used to normalize gene expression between the different hybridizations. The value presented after “[array code]:” represents the mean of the duplicate values, following background subtraction and probe normalization. One of skill in the art could routinely use this information to identify normal and/or diseased tissue(s) which show a predominant expression pattern of the corresponding polynucleotide of the invention or to identify polynucleotides which show predominant and/or specific tissue and/or cell expression. Column 9 provides the chromosomal location of polynucleotides corresponding to SEQ ID NO:X. Chromosomal location was determined by finding exact matches to EST and cDNA sequences contained in the NCBI (National Center for Biotechnology Information) UniGene database. Given a presumptive chromosomal location, disease locus association was determined by comparison with the Morbid Map, derived from Online Mendelian Inheritance in Man (Online Mendelian Inheritance in Man, OMIM™. McKusick-Nathans Institute for Genetic Medicine, Johns Hopkins University (Baltimore, Md.) and National Center for Biotechnology Information, National Library of Medicine (Bethesda, Md.) 2000. World Wide Web URL: http://www.ncbi.nlm.nih.gov/omim/). If the putative chromosomal location of the Query overlaps with the chromosomal location of a Morbid Map entry, an OMIM identification number is disclosed in column 10 labeled “OMIM Disease Reference(s)”. A key to the OMIM reference identification numbers is provided in Table 5.

[0024] Table 1B summarizes additional polynucleotides encompassed by the invention (including cDNA clones related to the sequences (Clone ID NO:Z), contig sequences (contig identifier (Contig ID:) contig nucleotide sequence identifiers (SEQ ID NO:X)), and genomic sequences (SEQ ID NO:B). The first column provides a unique clone identifier, “Clone ID NO:Z”, for a cDNA clone related to each contig sequence. The second column provides the sequence identifier, “SEQ ID NO:X”, for each contig sequence. The third column provides a unique contig identifier, “Contig ID:” for each contig sequence. The fourth column, provides a BAC identifier “BAC ID NO:A” for the BAC clone referenced in the corresponding row of the table. The fifth column provides the nucleotide sequence identifier, “SEQ ID NO:B” for a fragment of the BAC clone identified in column four of the corresponding row of the table. The sixth column, “Exon From-To”, provides the location (i.e., nucleotide position numbers) within the polynucleotide sequence of SEQ ID NO:B which delineate certain polynucleotides of the invention that are also exemplary members of polynucleotide sequences that encode polypeptides of the invention (e.g., polypeptides containing amino acid sequences encoded by the polynucleotide sequences delineated in column six, and fragments and variants thereof).

[0025] Table 2 summarizes homology and features of some of the polypeptides of the invention. The first column provides a unique clone identifier, “Clone ID NO:Z”, corresponding to a cDNA clone disclosed in Table 1A. The second column provides the unique contig identifier, “Contig ID:” corresponding to contigs in Table 1A and allowing for correlation with the information in Table 1A. The third column provides the sequence identifier, “SEQ ID NO:X”, for the contig polynucleotide sequence. The fourth column provides the analysis method by which the homology/identity disclosed in the Table was determined. Comparisons were made between polypeptides encoded by the polynucleotides of the invention and either a non-redundant protein database (herein referred to as “NR”), or a database of protein families (herein referred to as “PFAM”) as further described below. The fifth column provides a description of the PFAM/NR hit having a significant match to a polypeptide of the invention. Column six provides the accession number of the PFAM/NR hit disclosed in the fifth column. Column seven, “Score/Percent Identity”, provides a quality score or the percent identity, of the hit disclosed in columns five and six. Columns 8 and 9, “NT From” and “NT To” respectively, delineate the polynucleotides in “SEQ ID NO:X” that encode a polypeptide having a significant match to the PFAM/NR database as disclosed in the fifth and sixth columns. In specific embodiments polypeptides of the invention comprise, or alternatively consist of, an amino acid sequence encoded by a polynucleotide in SEQ ID NO:X as delineated in columns 8 and 9, or fragments or variants thereof.

[0026] Table 3 provides polynucleotide sequences that may be disclaimed according to certain embodiments of the invention. The first column provides a unique clone identifier, “Clone ID”, for a cDNA clone related to contig sequences disclosed in Table 1A. The second column provides the sequence identifier, “SEQ ID NO:X”, for contig sequences disclosed in Table 1A. The third column provides the unique contig identifier, “Contig ID:”, for contigs disclosed in Table 1A. The fourth column provides a unique integer ‘a’ where ‘a’ is any integer between 1 and the final nucleotide minus 15 of SEQ ID NO:X, and the fifth column provides a unique integer ‘b’ where ‘b’ is any integer between 15 and the final nucleotide of SEQ ID NO:X, where both a and b correspond to the positions of nucleotide residues shown in SEQ ID NO:X, and where b is greater than or equal to a +14. For each of the polynucleotides shown as SEQ ID NO:X, the uniquely defined integers can be substituted into the general formula of a-b, and used to describe polynucleotides which may be preferably excluded from the invention. In certain embodiments, preferably excluded from the invention are at least one, two, three, four, five, ten, or more of the polynucleotide sequence(s) having the accession number(s) disclosed in the sixth column of this Table (including for example, published sequence in connection with a particular BAC clone). In further embodiments, preferably excluded from the invention are the specific polynucleotide sequence(s) contained in the clones corresponding to at least one, two, three, four, five, ten, or more of the available material having the accession numbers identified in the sixth column of this Table (including for example, the actual sequence contained in an identified BAC clone).

[0027] Table 4 provides a key to the tissue/cell source identifier code disclosed in Table 1A, column 8. Column 1 provides the tissue/cell source identifier code disclosed in Table 1A, Column 8. Columns 2-5 provide a description of the tissue or cell source. Codes corresponding to diseased tissues are indicated in column 6 with the word “disease”. The use of the word “disease” in column 6 is non-limiting. The tissue or cell source may be specific (e.g. a neoplasm), or may be disease-associated (e.g., a tissue sample from a normal portion of a diseased organ). Furthermore, tissues and/or cells lacking the “disease” designation may still be derived from sources directly or indirectly involved in a disease state or disorder, and therefore may have a further utility in that disease state or disorder. In numerous cases where the tissue/cell source is a library, column 7 identifies the vector used to generate the library.

[0028] Table 5 provides a key to the OMIM reference identification numbers disclosed in Table 1A, column 10. OMIM reference identification numbers (Column 1) were derived from Online Mendelian Inheritance in Man (Online Mendelian Inheritance in Man, OMIM. McKusick-Nathans Institute for Genetic Medicine, Johns Hopkins University (Baltimore, Md.) and National Center for Biotechnology Information, National Library of Medicine, (Bethesda, Md.) 2000. World Wide Web URL: http://www.ncbi.nlm.nih.gov/omim/). Column 2 provides diseases associated with the cytologic band disclosed in Table 1A, column 9, as determined using the Morbid Map database.

[0029] Table 6 summarizes ATCC Deposits, Deposit dates, and ATCC designation numbers of deposits made with the ATCC in connection with the present application.

[0030] Table 7 shows the cDNA libraries sequenced, and ATCC designation numbers and vector information relating to these cDNA libraries.

[0031] Table 8 provides a physical characterization of clones encompassed by the invention. The first column provides the unique clone identifier, “Clone ID NO:Z”, for certain cDNA clones of the invention, as described in Table 1A. The second column provides the size of the cDNA insert contained in the corresponding cDNA clone.

[0032] Definitions

[0033] The following definitions are provided to facilitate understanding of certain terms used throughout this specification.

[0034] In the present invention, “isolated” refers to material removed from its original environment (e.g., the natural environment if it is naturally occurring), and thus is altered “by the hand of man” from its natural state. For example, an isolated polynucleotide could be part of a vector or a composition of matter, or could be contained within a cell, and still be “isolated” because that vector, composition of matter, or particular cell is not the original environment of the polynucleotide. The term “isolated” does not refer to genomic or cDNA libraries, whole cell total or mRNA preparations, genomic DNA preparations (including those separated by electrophoresis and transferred onto blots), sheared whole cell genomic DNA preparations or other compositions where the art demonstrates no distinguishing features of the polynucleotide/sequences of the present invention.

[0035] As used herein, a “polynucleotide” refers to a molecule having a nucleic acid sequence encoding SEQ ID NO:Y or a fragment or variant thereof; a nucleic acid sequence contained in SEQ ID NO:X (as described in column 3 of Table 1A) or the complement thereof; a cDNA sequence contained in Clone ID NO:Z (as described in column 2 of Table 1A and contained within a library deposited with the ATCC); a nucleotide sequence encoding the polypeptide encoded by a nucleotide sequence in SEQ ID NO:B as defined in column 6 of Table 1B or a fragment or variant thereof; or a nucleotide coding sequence in SEQ ID NO:B as defined in column 6 of Table 1B or the complement thereof. For example, the polynucleotide can contain the nucleotide sequence of the full length cDNA sequence, including the 5′ and 3′ untranslated sequences, the coding region, as well as fragments, epitopes, domains, and variants of the nucleic acid sequence. Moreover, as used herein, a “polypeptide” refers to a molecule having an amino acid sequence encoded by a polynucleotide of the invention as broadly defined (obviously excluding poly-Phenylalanine or poly-Lysine peptide sequences which result from translation of a polyA tail of a sequence corresponding to a cDNA).

[0036] In the present invention, “SEQ ID NO:X” was often generated by overlapping sequences contained in multiple clones (contig analysis). A representative clone containing all or most of the sequence for SEQ ID NO:X is deposited at Human Genome Sciences, Inc. (HGS) in a catalogued and archived library. As shown, for example, in column 2 of Table 1A, each clone is identified by a cDNA Clone ID (identifier generally referred to herein as Clone ID NO:Z). Each Clone ID is unique to an individual clone and the Clone ID is all the information needed to retrieve a given clone from the HGS library. Furthermore, certain clones disclosed in this application have been deposited with the ATCC on October 5, 2000, having the ATCC designation numbers PTA 2574 and PTA 2575; and on Jan. 5, 2001, having the depositor reference numbers TS-1, TS-2, AC-1, and AC-2. In addition to the individual cDNA clone deposits, most of the cDNA libraries from which the clones were derived were deposited at the American Type Culture Collection (hereinafter “ATCC”). Table 7 provides a list of the deposited cDNA libraries. One can use the Clone ID NO:Z to determine the library source by reference to Tables 6 and 7. Table 7 lists the deposited cDNA libraries by name and links each library to an ATCC Deposit. Library names contain four characters, for example, “HTWE.” The name of a cDNA clone (Clone ID) isolated from that library begins with the same four characters, for example “HTWEP07”. As mentioned below, Table 1A correlates the Clone ID names with SEQ ID NO:X. Thus, starting with an SEQ ID NO:X, one can use Tables 1, 6 and 7 to determine the corresponding Clone ID, which library it came from and which ATCC deposit the library is contained in. Furthermore, it is possible to retrieve a given cDNA clone from the source library by techniques known in the art and described elsewhere herein. The ATCC is located at 10801 University Boulevard, Manassas, Va. 20110-2209, USA. The ATCC deposits were made pursuant to the terms of the Budapest Treaty on the international recognition of the deposit of microorganisms for the purposes of patent procedure.

[0037] In specific embodiments, the polynucleotides of the invention are at least 15, at least 30, at least 50, at least 100, at least 125, at least 500, or at least 1000 continuous nucleotides but are less than or equal to 300 kb, 200 kb, 100 kb, 50 kb, 15 kb, 10 kb, 7.5kb, 5 kb, 2.5 kb, 2.0 kb, or 1 kb, in length. In a further embodiment, polynucleotides of the invention comprise a portion of the coding sequences, as disclosed herein, but do not comprise all or a portion of any intron. In another embodiment, the polynucleotides comprising coding sequences do not contain coding sequences of a genomic flanking gene (i.e., 5′ or 3′ to the gene of interest in the genome). In other embodiments, the polynucleotides of the invention do not contain the coding sequence of more than 1000, 500, 250, 100, 50, 25, 20, 15, 10, 5, 4, 3, 2, or 1 genomic flanking gene(s).

[0038] A “polynucleotide” of the present invention also includes those polynucleotides capable of hybridizing, under stringent hybridization conditions, to sequences contained in SEQ ID NO:X, or the complement thereof (e.g., the complement of any one, two, three, four, or more of the polynucleotide fragments described herein), the polynucleotide sequence delineated in columns 8 and 9 of Table 2 or the complement thereof, and/or cDNA sequences contained in Clone ID NO:Z (e.g., the complement of any one, two, three, four, or more of the polynucleotide fragments, or the cDNA clone within the pool of cDNA clones deposited with the ATCC, described herein), and/or the polynucleotide sequence delineated in column 6 of Table 1B or the complement thereof. “Stringent hybridization conditions” refers to an overnight incubation at 42 degree C. in a solution comprising 50% formamide, 5× SSC (750 mM NaCl, 75 mM trisodium citrate), 50 mM sodium phosphate (pH 7.6), 5× Denhardt's solution, 10% dextran sulfate, and 20 μg/ml denatured, sheared salmon sperm DNA, followed by washing the filters in 0.1× SSC at about 65 degree C.

[0039] Also contemplated are nucleic acid molecules that hybridize to the polynucleotides of the present invention at lower stringency hybridization conditions. Changes in the stringency of hybridization and signal detection are primarily accomplished through the manipulation of formamide concentration (lower percentages of formamide result in lowered stringency); salt conditions, or temperature. For example, lower stringency conditions include an overnight incubation at 37 degree C. in a solution comprising 6× SSPE (20× SSPE =3M NaCl; 0.2M NaH₂PO₄; 0.02M EDTA, pH 7.4), 0.5% SDS, 30% formamide, 100 ug/ml salmon sperm blocking DNA; followed by washes at 50 degree C. with 1× SSPE, 0.1% SDS. In addition, to achieve even lower stringency, washes performed following stringent hybridization can be done at higher salt concentrations (e.g. 5× SSC).

[0040] Note that variations in the above conditions may be accomplished through the inclusion and/or substitution of alternate blocking reagents used to suppress background in hybridization experiments. Typical blocking reagents include Denhardt's reagent, BLOTTO, heparin, denatured salmon sperm DNA, and commercially available proprietary formulations. The inclusion of specific blocking reagents may require modification of the hybridization conditions described above, due to problems with compatibility.

[0041] Of course, a polynucleotide which hybridizes only to polyA+sequences (such as any 3′ terminal polyA+ tract of a cDNA shown in the sequence listing), or to a complementary stretch of T (or U) residues, would not be included in the definition of “polynucleotide,” since such a polynucleotide would hybridize to any nucleic acid molecule containing a poly (A) stretch or the complement thereof (e.g., practically any double-stranded cDNA clone generated using oligo dT as a primer).

[0042] The polynucleotide of the present invention can be composed of any polyribonucleotide or polydeoxribonucleotide, which may be unmodified RNA or DNA or modified RNA or DNA. For example, polynucleotides can be composed of single- and double-stranded DNA, DNA that is a mixture of single- and double-stranded regions, single- and double-stranded RNA, and RNA that is mixture of single- and double-stranded regions, hybrid molecules comprising DNA and RNA that may be single-stranded or, more typically, double-stranded or a mixture of single- and double-stranded regions. In addition, the polynucleotide can be composed of triple-stranded regions comprising RNA or DNA or both RNA and DNA. A polynucleotide may also contain one or more modified bases or DNA or RNA backbones modified for stability or for other reasons. “Modified” bases include, for example, tritylated bases and unusual bases such as inosine. A variety of modifications can be made to DNA and RNA; thus, “polynucleotide” embraces chemically, enzymatically, or metabolically modified forms.

[0043] The polypeptide of the present invention can be composed of amino acids joined to each other by peptide bonds or modified peptide bonds, i.e., peptide isosteres, and may contain amino acids other than the 20 gene-encoded amino acids. The polypeptides may be modified by either natural processes, such as posttranslational processing, or by chemical modification techniques which are well known in the art. Such modifications are well described in basic texts and in more detailed monographs, as well as in a voluminous research literature. Modifications can occur anywhere in a polypeptide, including the peptide backbone, the amino acid side-chains and the amino or carboxyl termini. It will be appreciated that the same type of modification may be present in the same or varying degrees at several sites in a given polypeptide. Also, a given polypeptide may contain many types of modifications. Polypeptides may be branched, for example, as a result of ubiquitination, and they may be cyclic, with or without branching. Cyclic, branched, and branched cyclic polypeptides may result from posttranslation natural processes or may be made by synthetic methods. Modifications include acetylation, acylation, ADP-ribosylation, amidation, covalent attachment of flavin, covalent attachment of a heme moiety, covalent attachment of a nucleotide or nucleotide′ derivative, covalent attachment of a lipid or lipid derivative, covalent attachment of phosphotidylinositol, cross-linking, cyclization, disulfide bond formation, demethylation, formation of covalent cross-links, formation of cysteine, formation of pyroglutamate, formylation, gamma-carboxylation, glycosylation, GPI anchor formation, hydroxylation, iodination, methylation, myristoylation, oxidation, pegylation, proteolytic processing, phosphorylation, prenylation, racemization, selenoylation, sulfation, transfer-RNA mediated addition of amino acids to proteins such as arginylation, and ubiquitination. (See, for instance, PROTEINS—STRUCTURE AND MOLECULAR PROPERTIES, 2nd Ed., T. E. Creighton, W. H. Freeman and Company, New York (1993); POSTTRANSLATIONAL COVALENT MODIFICATION OF PROTEINS, B. C. Johnson, Ed., Academic Press, New York, pgs. 1-12 (1983); Seifter et al., Meth. Enzymol. 182:626-646 (1990); Rattan et al., Ann. N.Y. Acad. Sci. 663:48-62 (1992)).

[0044] “SEQ ID NO:X” refers to a polynucleotide sequence described, for example, in Tables 1A or 2, while “SEQ ID NO:Y” refers to a polypeptide sequence described in column 6 of Table 1A. SEQ ID NO:X is identified by an integer specified in column 4 of Table 1A. The polypeptide sequence SEQ ID NO:Y is a translated open reading frame (ORF) encoded by polynucleotide SEQ ID NO:X. “Clone ID NO:Z” refers to a cDNA clone described in column 2 of Table 1A.

[0045] “A polypeptide having functional activity” refers to a polypeptide capable of displaying one or more known functional activities associated with a full-length (complete) protein. Such functional activities include, but are not limited to, biological activity, antigenicity [ability to bind (or compete with a polypeptide for binding) to an anti-polypeptide antibody], immunogenicity (ability to generate antibody which binds to a specific polypeptide of the invention), ability to form multimers with polypeptides of the invention, and ability to bind to a receptor or ligand for a polypeptide.

[0046] The polypeptides of the invention can be assayed for functional activity (e.g. biological activity) using or routinely modifying assays known in the art, as well as assays described herein. Specifically, one of skill in the art may routinely assay DNA binding polypeptides (including fragments and variants) of the invention for activity using assays described in Lehiri and Ge, Brain Research. Brain Research Protocols 5: 257-265 (2000); Winter et al., Anals of Biochemistry 105: 39-47 (1980); and/or as described in the examples section below.

[0047] “A polypeptide having biological activity” refers to a polypeptide exhibiting activity similar to, but not necessarily identical to, an activity of a polypeptide of the present invention, including mature forms, as measured in a particular biological assay, with or without dose dependency. In the case where dose dependency does exist, it need not be identical to that of the polypeptide, but rather substantially similar to the dose-dependence in a given activity as compared to the polypeptide of the present invention (i.e., the candidate polypeptide will exhibit greater activity or not more than about 25-fold less and, preferably, not more than about tenfold less activity, and most preferably, not more than about three-fold less activity relative to the polypeptide of the present invention).

[0048] Table 1A summarizes some of the polynucleotides encompassed by the invention (including contig sequences (SEQ ID NO:X) and clones (Clone ID NO:Z) and further summarizes certain characteristics of these polynucleotides and the polypeptides encoded thereby.

[0049] Polynucleotides and Polypeptides of the Invention

TABLE 1A

| | | | | | AA | | Tissue Distribution | | |
|---|---|---|---|---|---|---|---|---|---|
| | | | | | SEQ | | Library code: count | | OMIM |
| Gene | Clone ID | Contig | SEQ ID | ORF | ID | | (see Table IV for | Cytologic | Disease |
| No: | NO: Z | ID: | NO: X | (From-To) | NO: Y | Predicted Epitopes | Library Codes) | Band | Reference(s): |
| 1 | HCHBA22 | 1103891 | 11 | 765-1 | 139 | | AR061: 1, AR089: 1 | | |
| | | | | | | | H0483: 1, L0617: 1, | | |
| | | | | | | | H0553: 1, H0551: 1, | | |
| | | | | | | | H0519: 1, H0435: 1, | | |
| | | | | | | | S0152: 1, H0522: 1, | | |
| | | | | | | | L0097: 1 and H0542: 1. | | |
| | | 928250 | 91 | 1-603 | 219 | Ser-17 to Glu-22, | | | |
| | | | | | | Glu-35 to Lys-54, | | | |
| | | | | | | Thr-94 to Thr-99, | | | |
| | | | | | | Ser-109 to Ala-118. | | | |
| 2 | HEEAA77 | 1227542 | 12 | 3-1433 | 140 | Arg-1 to Val-9, | AR089: 19, AR061: 15 | | |
| | | | | | | Asp-44 to Thr-53, | H0494: 3, H0550: 2, | | |
| | | | | | | Lys-60 to Glu-72, | S0152: 2, H0556: 1, | | |
| | | | | | | Arg-87 to Pro-126, | S0342: 1, S0218: 1, | | |
| | | | | | | Lys-133 to Ser-140, | S0116: 1, H0484: 1, | | |
| | | | | | | Gln-147 to Thr-153, | H0125: 1, S0420: 1, | | |
| | | | | | | Phe-188 to Val-207, | H0549: 1, T0114: 1, | | |
| | | | | | | Gly-224 to Arg-235, | H0013: 1, H0250: 1, | | |
| | | | | | | Asp-293 to Leu-304, | H0318: 1, H0530: 1, | | |
| | | | | | | Arg-309 to Tyr-317, | H0688: 1, H0553: 1, | | |
| | | | | | | Lys-336 to Leu-343, | H0038: 1, H0633: 1, | | |
| | | | | | | Leu-388 to Lys-398, | S0002: 1, L0509: 1, | | |
| | | | | | | Thr-453 to Cys-461. | L0776: 1, L0792: 1, | | |
| | | | | | | | H0519: 1, H0435: 1, | | |
| | | | | | | | H0521: 1, L0750: 1, | | |
| | | | | | | | L0779: 1 and L0752: 1. | | |
| | | 867727 | 92 | 3-851 | 220 | Arg-1 to Val-9, | | | |
| | | | | | | Asp-44 to Thr-53, | | | |
| | | | | | | Lys-60 to Glu-72, | | | |
| | | | | | | Arg-87 to Pro-126, | | | |
| | | | | | | Lys-133 to Ser-140, | | | |
| | | | | | | Gln-147 to Thr-153. | | | |
| 3 | HDAAV32 | 714803 | 13 | 1-444 | 141 | Leu-13 to Pro-18, | AR089: 15, AR061: 2 | 1p22 | 170995, |
| | | | | | | Pro-21 to Thr-26. | L0748: 21, L0749: 16, | | 191540, |
| | | | | | | | L0758: 15, L0754: 14, | | 274270, |
| | | | | | | | L0666: 13, L0747: 13, | | 274270, |
| | | | | | | | H0038: 12, L0665: 12, | | 600309, |
| | | | | | | | H0547: 12, L0740: 12, | | 601414, |
| | | | | | | | L0731: 11, L0591: 11, | | 602094 |
| | | | | | | | L0485: 11, S0358: 10, | | |
| | | | | | | | S0002: 8, L0662: 8, | | |
| | | | | | | | L0659: 8, L0663: 8, | | |
| | | | | | | | L0752: 8, L0755: 8, | | |
| | | | | | | | S0003: 7, L0483: 7, | | |
| | | | | | | | L0766: 7, L0744: 7, | | |
| | | | | | | | L0750: 7, L0777: 7, | | |
| | | | | | | | H0657: 6, H0013: 6, | | |
| | | | | | | | S0280: 6, H0318: 6, | | |
| | | | | | | | H0040: 6, L0776: 6, | | |
| | | | | | | | H0521: 6, 53014: 6, | | |
| | | | | | | | H0445: 6, H0656: 5, | | |
| | | | | | | | H0068: 5, H0623: 5, | | |
| | | | | | | | L0520: 5, L0771: 5, | | |
| | | | | | | | L0768: 5, H0696: 5, | | |
| | | | | | | | S0027: 5, L0592: 5, | | |
| | | | | | | | L0604: 5, L0595: 5, | | |
| | | | | | | | S0194: 5, H0423: 5, | | |
| | | | | | | | S0116: 4, L0717: 4, | | |
| | | | | | | | H0427: 4, H0266: 4, | | |
| | | | | | | | H0687: 4, H0615: 4, | | |
| | | | | | | | H0031. 4, H0616. 4, | | |
| | | | | | | | L0521: 4, L0655: 4, | | |
| | | | | | | | S0126: 4, H0660: 4, | | |
| | | | | | | | S0206: 4, H0542: 4, | | |
| | | | | | | | L0600: 4, H0638: 3, | | |
| | | | | | | | H0580: 3, S0222: 3, | | |
| | | | | | | | H0587: 3, H0497: 3, | | |
| | | | | | | | H0581: 3, H0046: 3, | | |
| | | | | | | | L0471: 3, H0014: 3, | | |
| | | | | | | | H0644: 3, L0142: 3, | | |
| | | | | | | | S0036: 3, H0090: 3, | | |
| | | | | | | | H0551: 3, L0564: 3, | | |
| | | | | | | | L0763: 3, L0769: 3, | | |
| | | | | | | | L0772; 3, L0767: 3, | | |
| | | | | | | | L0803: 3, L0774: 3, | | |
| | | | | | | | L0775: 3, L0651: 3, | | |
| | | | | | | | L0809: 3, L0664: 3, | | |
| | | | | | | | S0374: 3, H0520: 3, | | |
| | | | | | | | S0380: 3, H0555: 3, | | |
| | | | | | | | S0028: 3, L0757: 3, | | |
| | | | | | | | L0362: 3, S0196: 3, | | |
| | | | | | | | H0506: 3, H0686: 2, | | |
| | | | | | | | S0114: 2, T0049: 2, | | |
| | | | | | | | H0341: 2, H0662: 2, | | |
| | | | | | | | S0418: 2, S0420: 2, | | |
| | | | | | | | S0376: 2, S0360: 2, | | |
| | | | | | | | H0329: 2, S0045: 2, | | |
| | | | | | | | H0619: 2, H0486: 2, | | |
| | | | | | | | H0706: 2, S0010: 2, | | |
| | | | | | | | S0346: 2, T0048: 2, | | |
| | | | | | | | S0474: 2, H0123: 2, | | |
| | | | | | | | H0050: 2, H0023: 2, | | |
| | | | | | | | H0057: 2, H0428: 2, | | |
| | | | | | | | H0553: 2, H0674: 2, | | |
| | | | | | | | S0364: 2, S0366: 2, | | |
| | | | | | | | H0591: 2, H0634: 2, | | |
| | | | | | | | H0264: 2, H0412: 2, | | |
| | | | | | | | H0056: 2, H0059: 2, | | |
| | | | | | | | T0041: 2, S0422: 2, | | |
| | | | | | | | L0770: 2, L0637: 2, | | |
| | | | | | | | L0761: 2, L0667: 2, | | |
| | | | | | | | L0646: 2, L0764: 2, | | |
| | | | | | | | L0653: 2, L0657: 2, | | |
| | | | | | | | L0783: 2, H0144: 2, | | |
| | | | | | | | H0519: 2, H0689: 2, | | |
| | | | | | | | H0659: 2, H0648: 2, | | |
| | | | | | | | H0651: 2, S0328: 2, | | |
| | | | | | | | H0539: 2, S0152: 2, | | |
| | | | | | | | S0146: 2, S0404: 2, | | |
| | | | | | | | H0436: 2, L0780: 2, | | |
| | | | | | | | S0031: 2, L0589: 2, | | |
| | | | | | | | L0599: 2, L0593: 2, | | |
| | | | | | | | S0026: 2, H0667: 2, | | |
| | | | | | | | H0543: 2, H0422: 2, | | |
| | | | | | | | H0352: 2, H0170: 1, | | |
| | | | | | | | H0171: 1, H0556: 1, | | |
| | | | | | | | T0002: 1, L0785: 1, | | |
| | | | | | | | S0212: 1, S0001: 1, | | |
| | | | | | | | S0282: 1, H0663: 1, | | |
| | | | | | | | H0305: 1, S0356: 1, | | |
| | | | | | | | H0675: 1, S0046: 1, | | |
| | | | | | | | S0300: 1, H0411: 1, | | |
| | | | | | | | H0550: 1, H0441: 1, | | |
| | | | | | | | H0370: 1, H0600: 1, | | |
| | | | | | | | S0005: 1, H0333: 1, | | |
| | | | | | | | H0331: 1, H0574: 1, | | |
| | | | | | | | L0022: 1, T0082: 1, | | |
| | | | | | | | H0122: 1, H0036: 1, | | |
| | | | | | | | H0196: 1, H0052: 1, | | |
| | | | | | | | T0103: 1, L0040: 1, | | |
| | | | | | | | H0327: 1, H0150: 1, | | |
| | | | | | | | H0572: 1, T0003: 1; | | |
| | | | | | | | H0373: 1, T0010: 1, | | |
| | | | | | | | H0510: 1, H0179: 1, | | |
| | | | | | | | H0416: 1, S0318: 1, | | |
| | | | | | | | S0316: 1, S0250: 1, | | |
| | | | | | | | S0214: 1, H0039: 1, | | |
| | | | | | | | H0622: 1, H0074: 1, | | |
| | | | | | | | H0606: 1, H0165: 1, | | |
| | | | | | | | H0673: 1, H0168: 1, | | |
| | | | | | | | H0169: 1, H0124: 1, | | |
| | | | | | | | H0598: 1, H0135: 1, | | |
| | | | | | | | H0163: 1, H0272: 1, | | |
| | | | | | | | H0488: 1, H0413: 1, | | |
| | | | | | | | S0386: 1, L0370: 1, | | |
| | | | | | | | L0475: 1, S0014: 1, | | |
| | | | | | | | T0625: 1, S0306: 1, | | |
| | | | | | | | H0509: 1, H0131: 1, | | |
| | | | | | | | H0130: 1, H0641: 1, | | |
| | | | | | | | H0647: 1, S0142: 1, | | |
| | | | | | | | S0344: 1, L0598: 1, | | |
| | | | | | | | L0369: 1, L0640: 1, | | |
| | | | | | | | L0631: 1, L0372: 1, | | |
| | | | | | | | L0643: 1, L0773: 1, | | |
| | | | | | | | L0626: 1, L0794: 1, | | |
| | | | | | | | L0387: 1, L0804: 1, | | |
| | | | | | | | L0650: 1, L0375: 1, | | |
| | | | | | | | L0806: 1, L0527: 1, | | |
| | | | | | | | L0656: 1, L0790: 1, | | |
| | | | | | | | L0791: 1, H0691: 1, | | |
| | | | | | | | H0693: 1, H0683: 1, | | |
| | | | | | | | H0435: 1, H0670: 1, | | |
| | | | | | | | H0672: 1, S0330: 1, | | |
| | | | | | | | S0013: 1, S0176: 1, | | |
| | | | | | | | S0174: 1, H0478: 1, | | |
| | | | | | | | S0390: 1, L0743: 1, | | |
| | | | | | | | L0745: 1, L0756: 1, | | |
| | | | | | | | H0444: 1, H0707: 1, | | |
| | | | | | | | L0588: 1, L0590: 1, | | |
| | | | | | | | L0608: 1, L0594: 1, | | |
| | | | | | | | H0668: 1, H0665: 1, | | |
| | | | | | | | S0192: 1, S0276: 1 and | | |
| | | | | | | | S0446: 1. | | |
| 4 | HTLGM07 | 1158948 | 14 | 2-910 | 142 | Arg-17 to Glu-22, | AR089: 21, AR061: 16 | | |
| | | | | | | Ile-31 to Phe-39, | H0618: 32, H0253: 13, | | |
| | | | | | | Gly-75 to Phe-88, | H0616: 6, L0758: 3, | | |
| | | | | | | Pro-111 to Trp-128, | H0038: 2, L0794: 2, | | |
| | | | | | | Phe-133 to Ala-164, | H0009: 1, H0688: 1, | | |
| | | | | | | Glu-167 to Gly-193. | L0769: 1, L0372: 1, | | |
| | | | | | | | L0646: 1, L0363: 1, | | |
| | | | | | | | L0766: 1, L0790: 1, | | |
| | | | | | | | L0665: 1, H0670: 1 and | | |
| | | | | | | | L0779: 1. | | |
| | | 952254 | 93 | 3-761 | 221 | Arg-1 to Glu-6, | | | |
| | | | | | | Ile-15 to Phe-23, | | | |
| | | | | | | Gly-59 to Phe-72, | | | |
| | | | | | | Pro-95 to Trp-112, | | | |
| | | | | | | Phe-117 to Pro-129. | | | |
| 5 | HTLHC14 | 908428 | 15 | 3-503 | 143 | Gly-38 to Phe-51, | AR061: 7, AR089: 4 | | |
| | | | | | | Pro-74 to Trp-91, | H0618: 32, H0253: 13, | | |
| | | | | | | Phe-96 to Ala-127, | H0616: 6, L0758: 3, | | |
| | | | | | | Glu-130 to Gly-148. | H0038: 2, L0794: 2, | | |
| | | | | | | | H0009: 1, H0688: 1, | | |
| | | | | | | | L0769: 1, L0372: 1, | | |
| | | | | | | | L0646: 1, L0363: 1, | | |
| | | | | | | | L0766: 1, L0790: 1, | | |
| | | | | | | | L0665: 1, H0670: 1 and | | |
| | | | | | | | L0779: 1. | | |
| 6 | HAFBC92 | 1150863 | 16 | 3-497 | 144 | Ser-9 to Pro-15, | AR061: 7, AR089: 6 | | |
| | | | | | | Lys-20 to Cys-29, | L0789: 10, L0751: 7, | | |
| | | | | | | Arg-66 to Glu-78, | L0766: 6, L0769: 4, | | |
| | | | | | | Lys-84 to Glu-90, | L0794: 4, L0809: 4, | | |
| | | | | | | Asp-106 to Val-114, | L0779: 4, L0803: 3, | | |
| | | | | | | Ser-126 to Lys-165. | L0755: 3, L0805: 2, | | |
| | | | | | | | L0749: 2, L0750: 2, | | |
| | | | | | | | T0049: 1, H0254: 1, | | |
| | | | | | | | H0255: 1, S0420: 1, | | |
| | | | | | | | H0644: 1, L0796: 1, | | |
| | | | | | | | L0806: 1, L0776: 1, | | |
| | | | | | | | L0655: 1, S0328: 1, | | |
| | | | | | | | L0740: 1 and L0777: 1. | | |
| | | 918131 | 94 | 196-549 | 222 | Thr-6 to Ser-12, | | | |
| | | | | | | Tyr-21 to Glu-29, | | | |
| | | | | | | Lys-35 to Glu-41, | | | |
| | | | | | | Asp-57 to Val-65, | | | |
| | | | | | | Ser-77 to Gly-118. | | | |
| 7 | HAPOI92 | 785576 | 17 | 1-543 | 145 | | AR061: 2, AR089: 2 | | |
| 8 | HAVNO06 | 1151375 | 18 | 69-215 | 146 | Lys-36 to Lys-49. | AR089: 1, AR061: 0 | | |
| | | | | | | | S0412: 8, H0170: 1, | | |
| | | | | | | | H0150: 1, H0674: 1, | | |
| | | | | | | | H0551: 1 and L0779: 1. | | |
| | | 933954 | 95 | 124-297 | 223 | Lys-36 to Lys-58. | | | |
| 9 | HBAGY72 | 859099 | 19 | 117-233 | 147 | Glu-6 to Gly-34. | AR089: 1, AR061: 0 | | |
| | | | | | | | H0521: 29, L0731: 15, | | |
| | | | | | | | L0748: 13, H0046: 12, | | |
| | | | | | | | L0750: 12, L0752: 11, | | |
| | | | | | | | L0659: 10, L0664: 10, | | |
| | | | | | | | H0694: 10, L0439: 10, | | |
| | | | | | | | H0556: 9, L0666: 9, | | |
| | | | | | | | L0747: 9, H0497: 8, | | |
| | | | | | | | L0655: 8, H0457: 7, | | |
| | | | | | | | H0423: 7, S0360: 6, | | |
| | | | | | | | H0581: 6, H0179: 6, | | |
| | | | | | | | L0749: 6, H0657: 5, | | |
| | | | | | | | S0354: 5, H0013: 5, | | |
| | | | | | | | S0474: 5, H0050: 5, | | |
| | | | | | | | H0090: 5, H0529: 5, | | |
| | | | | | | | L0771: 5, L0777: 5, | | |
| | | | | | | | L0755: 5, H0543: 5, | | |
| | | | | | | | H0620. 4, S0003. 4, | | |
| | | | | | | | L0769: 4, L0774: 4, | | |
| | | | | | | | L0783: 4, H0114: 4, | | |
| | | | | | | | H0547: 4, S0027: 4, | | |
| | | | | | | | L0740: 4, L0756: 4, | | |
| | | | | | | | L0599: 4, H0422: 4, | | |
| | | | | | | | H0656: 3, H0580: 3, | | |
| | | | | | | | S0046: 3, H0411: 3, | | |
| | | | | | | | H0409: 3, H0586: 3, | | |
| | | | | | | | H0587: 3, H0331: 3, | | |
| | | | | | | | H0427: 3, H0599: 3, | | |
| | | | | | | | H0012: 3, H0373: 3, | | |
| | | | | | | | H0266: 3, H0553: 3, | | |
| | | | | | | | H0644: 3, H0169: 3, | | |
| | | | | | | | H0674: 3, L0456: 3, | | |
| | | | | | | | H0268: 3, S0002: 3, | | |
| | | | | | | | L0770: 3, L0772: 3, | | |
| | | | | | | | L0646: 3, L0766: 3, | | |
| | | | | | | | L0776: 3, L0665: 3, | | |
| | | | | | | | L0438: 3, H0659: 3, | | |
| | | | | | | | H0660: 3, H0522: 3, | | |
| | | | | | | | H0436: 3, L0780: 3, | | |
| | | | | | | | L0759: 3, H0445: 3, | | |
| | | | | | | | H0265: 2, S0114: 2, | | |
| | | | | | | | S0134: 2, H0583: 2, | | |
| | | | | | | | H0650: 2, S0116: 2, | | |
| | | | | | | | H0341: 2, S0418: 2, | | |
| | | | | | | | S0140: 2, S0222: 2, | | |
| | | | | | | | H0486: 2, H0069: 2, | | |
| | | | | | | | H0042: 2, H0575: 2, | | |
| | | | | | | | S0010. 2, H0318. 2, | | |
| | | | | | | | H0052: 2, H0251: 2, | | |
| | | | | | | | T0110: 2, L0471: 2, | | |
| | | | | | | | H0271: 2, H0416: 2, | | |
| | | | | | | | H0039: 2, H0031: 2, | | |
| | | | | | | | H0673: 2, S0366: 2, | | |
| | | | | | | | H0038: 2, H0551: 2, | | |
| | | | | | | | H0412: 2, H0413: 2, | | |
| | | | | | | | S0015: 2, H0641: 2, | | |
| | | | | | | | S0144: 2, L0763: 2, | | |
| | | | | | | | L0642: 2, L0764: 2, | | |
| | | | | | | | L0773: 2, L0662: 2, | | |
| | | | | | | | L0768: 2, L0649: 2, | | |
| | | | | | | | L0651: 2, L0657: 2, | | |
| | | | | | | | L0517: 2, L0384: 2, | | |
| | | | | | | | L0519: 2, L0529: 2, | | |
| | | | | | | | L0543: 2, L0663: 2, | | |
| | | | | | | | H0520: 2, H0519: 2, | | |
| | | | | | | | H0670: 2, H0539: 2, | | |
| | | | | | | | H0518: 2, S0028: 2, | | |
| | | | | | | | L0757: 2, L0758: 2, | | |
| | | | | | | | H0707: 2, S0011: 2, | | |
| | | | | | | | S0026: 2, H0653: 2, | | |
| | | | | | | | H0542: 2, H0685: 1, | | |
| | | | | | | | S0342: 1, S0218: 1, | | |
| | | | | | | | H0306: 1, H0459: 1, | | |
| | | | | | | | H0638: 1, S0420: 1, | | |
| | | | | | | | S0356: 1, S0358: 1, | | |
| | | | | | | | S0376: 1, S0444: 1, | | |
| | | | | | | | H0637: 1, S0007: 1, | | |
| | | | | | | | S0045: 1, H0619: 1, | | |
| | | | | | | | L0717: 1, S0278: 1, | | |
| | | | | | | | H0431: 1, H0592: 1, | | |
| | | | | | | | S0414: 1, H0559: 1, | | |
| | | | | | | | T0039: 1, H0250: 1, | | |
| | | | | | | | H0635: 1, H0002: 1, | | |
| | | | | | | | H0036: 1, H0037: 1, | | |
| | | | | | | | H0390: 1, T0048: 1, | | |
| | | | | | | | H0421: 1, H0085: 1, | | |
| | | | | | | | H0596: 1, T0115: 1, | | |
| | | | | | | | H0327: 1, H0081: 1, | | |
| | | | | | | | H0011: 1, H0024: 1, | | |
| | | | | | | | H0014: 1, L0163: 1, | | |
| | | | | | | | S0388: 1, S0051: 1, | | |
| | | | | | | | H0354: 1, H0594: 1, | | |
| | | | | | | | H0110: 1, S0250: 1, | | |
| | | | | | | | S0214: 1, H0428: 1, | | |
| | | | | | | | H0622: 1, T0023: 1, | | |
| | | | | | | | T0006: 1, H0628: 1, | | |
| | | | | | | | L0055: 1, H0383: 1, | | |
| | | | | | | | S0036: 1, H0135: 1, | | |
| | | | | | | | H0591: 1, H0063: 1, | | |
| | | | | | | | H0488: 1, H0056: 1, | | |
| | | | | | | | H0494: 1, H0560: 1, | | |
| | | | | | | | H0625: 1, H0561: 1, | | |
| | | | | | | | S0464: 1, H0509: 1, | | |
| | | | | | | | H0646: 1, S0142: 1, | | |
| | | | | | | | L0451: 1, L0502: 1, | | |
| | | | | | | | L0640: 1, L0637: 1, | | |
| | | | | | | | L0761: 1, L0667: 1, | | |
| | | | | | | | L0650: 1, L0775: 1, | | |
| | | | | | | | L0378: 1, L0806: 1, | | |
| | | | | | | | L0653: 1, L0527: 1, | | |
| | | | | | | | L0635: 1, L0526: 1, | | |
| | | | | | | | L0782: 1, L0809: 1, | | |
| | | | | | | | L0530: 1, L0792: 1, | | |
| | | | | | | | S0053: 1, H0702: 1, | | |
| | | | | | | | L0565: 1, H0691: 1, | | |
| | | | | | | | H0693: 1, S0126: 1, | | |
| | | | | | | | H0689: 1, H0435: 1, | | |
| | | | | | | | H0658: 1, H0666: 1, | | |
| | | | | | | | H0648: 1, H0672: 1, | | |
| | | | | | | | S0330: 1, S0332: 1, | | |
| | | | | | | | H0696: 1, S0044: 1, | | |
| | | | | | | | H0555: 1, H0627: 1, | | |
| | | | | | | | S0206: 1, L0593: 1 and | | |
| | | | | | | | H0506: 1. | | |
| 10 | HBGMF11 | 1127815 | 20 | 2-241 | 148 | | AR089: 2, AR06L: 1 | | |
| | | | | | | | L0809: 3, L0731: 2, | | |
| | | | | | | | L0361: 2, H0546: 1, | | |
| | | | | | | | H0617: 1, H0100: 1, | | |
| | | | | | | | L0764: 1, L0386: 1, | | |
| | | | | | | | L0776: 1, L0518: 1, | | |
| | | | | | | | L0783: 1, L0383: 1, | | |
| | | | | | | | L0663: 1, L0665: 1, | | |
| | | | | | | | L0749: 1, L0752: 1, | | |
| | | | | | | | L0755: 1 and L0758: 1. | | |
| | | 966133 | 96 | 323-520 | 224 | Pro-7 to Arg-20, | | | |
| | | | | | | Glu-39 to Lys-66. | | | |
| 11 | HBGQQ95 | 1151377 | 21 | 143-499 | 149 | Ser-54 to Arg-59, | AR089: 1, AR061: 0 | | |
| | | | | | | Cys-96 to Gln-102, | H0617: 3, L0741: 3, | | |
| | | | | | | Ala-104 to Lys-119. | L0804: 2, L0438: 2, | | |
| | | | | | | | L0439: 2, H0294: 1, | | |
| | | | | | | | S0356: 1, L0717: 1, | | |
| | | | | | | | H0485: 1, H0439: 1, | | |
| | | | | | | | H0014: 1, H0071: 1, | | |
| | | | | | | | H0334: 1, L0769: 1, | | |
| | | | | | | | L0646: 1, L0649: 1, | | |
| | | | | | | | L0386: 1, L0774: 1, | | |
| | | | | | | | L0653: 1, L0659: 1, | | |
| | | | | | | | L0809: 1, L0666: 1, | | |
| | | | | | | | L0664: 1, L0665: 1, | | |
| | | | | | | | L0748: 1, L0751: 1, | | |
| | | | | | | | L0753: 1, L0581: 1, | | |
| | | | | | | | L0599: 1 and L0601: 1. | | |
| | | 959696 | 97 | 132-581 | 225 | Ser-54 to Arg-59, | | | |
| | | | | | | Cys-96 to Gln-102, | | | |
| | | | | | | Ala-104 to Lys-142. | | | |
| 12 | HBNAY35 | 1123262 | 22 | 1459-965 | 150 | Tr-118 to Thr-127, | AR089: 28, AR061: 17 | | |
| | | | | | | Asn-144 to Gly-151, | L0439: 5, L0438: 3, | | |
| | | | | | | Pro-156 to Ser-165. | S0037: 3, L0747: 3, | | |
| | | | | | | | L0805: 2, L0664: 2, | | |
| | | | | | | | L0740: 2, L0756: 2, | | |
| | | | | | | | L0599: 2, S0376: 1, | | |
| | | | | | | | H0618: 1, H0309: 1, | | |
| | | | | | | | H0012: 1, H0620: 1, | | |
| | | | | | | | H0188: 1, S0250: 1, | | |
| | | | | | | | L0764: 1, L0794: 1, | | |
| | | | | | | | L0803: 1, L0776: 1, | | |
| | | | | | | | L0666: 1, H0520: 1, | | |
| | | | | | | | H0689: 1, H0670: 1, | | |
| | | | | | | | L0731: 1, L0757: 1, | | |
| | | | | | | | L0758: 1 and L0592: 1. | | |
| | | 675638 | 98 | 481-14 | 226 | | | | |
| 13 | HCFCJ21 | 1010566 | 23 | 192-40 | 151 | Ser-41 to Gln-48. | AR089: 0, AR061: 0 | | |
| | | | | | | | H0422: 2 | | |
| | | 671028 | 99 | 72-191 | 227 | Leu-17 to Lys-40. | | | |
| 14 | HCRMZ59 | 922431 | 24 | 3-263 | 152 | Lys-53 to Lys-76. | AR089: 1, AR061: 0 | 10q11.1-q24 | 157640, |
| | | | | | | | L0439: 7, H0494: 6, | | 174900, |
| | | | | | | | L0657: 6, L0749: 6, | | 180250, |
| | | | | | | | H0529: 5, L0659: 5, | | 186770, |
| | | | | | | | S0374: 5, H0659: 5, | | 188550, |
| | | | | | | | L0748: 5, H0657: 4, | | 236730, |
| | | | | | | | S0360: 4, S0132: 4, | | 271245, |
| | | | | | | | S0003: 4, S0214: 4, | | 278000, |
| | | | | | | | S0036: 4, H0090: 4, | | 278000, |
| | | | | | | | H0561: 4, H0641: 4, | | 600095, |
| | | | | | | | L0768: 4, L0766: 4, | | 600512, |
| | | | | | | | L0666: 4, H0144: 4, | | 600835, |
| | | | | | | | H0519: 4, H0648: 4, | | 601107, |
| | | | | | | | H0539: 4, L0747: 4, | | 601130, |
| | | | | | | | L0362: 4, H0543: 4, | | 602082 |
| | | | | | | | H0341: 3, H0580: 3, | | |
| | | | | | | | S0046: 3, H0013: 3, | | |
| | | | | | | | L0372: 3, L0764: 3, | | |
| | | | | | | | L0521: 3, L0662: 3, | | |
| | | | | | | | L0775: 3, L0608: 3, | | |
| | | | | | | | S0026: 3, H0542: 3, | | |
| | | | | | | | H0422: 3, H0556: 2, | | |
| | | | | | | | S0116: 2, H0662: 2, | | |
| | | | | | | | H0369. 2, H0586. 2, | | |
| | | | | | | | H0486: 2, S0280: 2, | | |
| | | | | | | | S0010: 2, H0581: 2, | | |
| | | | | | | | T0115: 2, H0553: 2, | | |
| | | | | | | | H0038: 2, H0412: 2, | | |
| | | | | | | | H0413: 2, H0560: 2, | | |
| | | | | | | | L0774: 2, L0776: 2, | | |
| | | | | | | | L0783: 2, L0665: 2, | | |
| | | | | | | | L0438: 2, H0520: 2, | | |
| | | | | | | | H0435: 2, S0378: 2, | | |
| | | | | | | | L0602: 2, S0152: 2, | | |
| | | | | | | | S0027: 2, L0744: 2, | | |
| | | | | | | | L0779: 2, L0599: 2, | | |
| | | | | | | | H0423: 2, H0624: 1, | | |
| | | | | | | | H0170: 1, H0171: 1, | | |
| | | | | | | | T0049: 1, H0656: 1, | | |
| | | | | | | | S0212: 1, S0400: 1, | | |
| | | | | | | | H0459: 1, H0125: 1, | | |
| | | | | | | | S0420: 1, L0005: 1, | | |
| | | | | | | | S0356: 1, S0354: 1, | | |
| | | | | | | | S0358: 1, H0675: 1, | | |
| | | | | | | | T0008: 1, S0007: 1, | | |
| | | | | | | | S0045: 1, H0393: 1, | | |
| | | | | | | | S0222: 1, H0438: 1, | | |
| | | | | | | | H0497: 1, H0270: 1, | | |
| | | | | | | | T0039: 1, T0109: 1, | | |
| | | | | | | | H0427: 1, H0156: 1, | | |
| | | | | | | | L0021: 1, H0575: 1, | | |
| | | | | | | | S0346: 1, H0374: 1, | | |
| | | | | | | | H0052: 1, H0231: 1, | | |
| | | | | | | | H0544: 1, H0046: 1, | | |
| | | | | | | | H0123: 1, L0471: 1, | | |
| | | | | | | | S0048: 1, H0356: 1, | | |
| | | | | | | | S6028: 1, S0318: 1, | | |
| | | | | | | | H0687: 1, H0252: 1, | | |
| | | | | | | | H0428: 1, H0031: 1, | | |
| | | | | | | | H0644: 1, H0111: 1, | | |
| | | | | | | | S0364: 1, H0316: 1, | | |
| | | | | | | | H0591: 1, H0056: 1, | | |
| | | | | | | | H0059: 1, L0370: 1, | | |
| | | | | | | | S0440: 1, S0150: 1, | | |
| | | | | | | | H0538: 1, S0422: 1, | | |
| | | | | | | | L0762: 1, L0763: 1, | | |
| | | | | | | | L0638: 1, L0637: 1, | | |
| | | | | | | | L0772: 1, L0375: 1, | | |
| | | | | | | | L0806: 1, L0655: 1, | | |
| | | | | | | | L0558: 1, L0383: 1, | | |
| | | | | | | | L0663: 1, H0702: 1, | | |
| | | | | | | | L0352: 1, S0126: 1, | | |
| | | | | | | | H0684: 1, H0658: 1, | | |
| | | | | | | | H0670: 1, S0330: 1, | | |
| | | | | | | | H0518: 1, S0406: 1, | | |
| | | | | | | | H0478: 1, L0612: 1, | | |
| | | | | | | | S0032: 1, L0742: 1, | | |
| | | | | | | | L0752: 1, L0755: 1, | | |
| | | | | | | | L0731: 1, L0759: 1, | | |
| | | | | | | | S0031: 1, H0445: 1, | | |
| | | | | | | | S0434: 1, L0592: 1, | | |
| | | | | | | | L0366: 1, S0106: 1, | | |
| | | | | | | | H0667: 1 and S0276: | 1. | |
| 15 | HCRNM87 | 951839 | 25 | 3-314 | 153 | Gly-1 to Asp-12, | AR089: 1, AR061: 0 | | |
| | | | | | | Gly-29 to Gly-37, | L0758: 4, S0356: 3, | | |
| | | | | | | Gly-73 to Lys-99. | S0140: 3, L0764: 3, | | |
| | | | | | | | L0794: 3, S0360: 2, | | |
| | | | | | | | H0615: 2, L0761: 2, | | |
| | | | | | | | L0768: 2, L0803: 2, | | |
| | | | | | | | L0439: 2, L0751: 2, | | |
| | | | | | | | H0657: 1, H0661: 1, | | |
| | | | | | | | H0663: 1, L0539: 1, | | |
| | | | | | | | S0222: 1, H0486: 1, | | |
| | | | | | | | H0253: 1, H0188: 1, | | |
| | | | | | | | H0135: 1, T0041: 1, | | |
| | | | | | | | L0763: 1, L0770: 1, | | |
| | | | | | | | L0769: 1, L0796: 1, | | |
| | | | | | | | L0773: 1, L0662: 1, | | |
| | | | | | | | L0774: 1, L0659: 1, | | |
| | | | | | | | L0789: 1, L0664: 1, | | |
| | | | | | | | H0670: 1, L0609: 1, | | |
| | | | | | | | L0748: 1, L0777: 1, | | |
| | | | | | | | L0731: 1, H0665: 1 and | | |
| | | | | | | | H0542: 1. | | |
| 16 | HCROG94 | 1151467 | 26 | 290-3 | 154 | Pro-53 to Thr-59. | AR089: 0, AR061: 0 | | |
| | | | | | | | S0356: 2, T0010: 1, | | |
| | | | | | | | L0662: 1 and L0754: 1. | | |
| | | 963356 | 100 | 191-337 | 228 | Ser-22 to Lys-37. | | | |
| 17 | LIDPFZ70 | 1105004 | 27 | 229-522 | 155 | | AR054: 199, AR051: | | |
| | | | | | | | 196, AR050: 193, | | |
| | | | | | | | AR089: 22, AR061: 4 | | |
| | | | | | | | H0521: 1 | | |
| | | 709684 | 101 | 482-775 | 229 | Leu-40 to Gly-93. | | | |
| | | 872273 | 102 | 289-522 | 230 | | | | |
| 18 | HDPW1J54 | 969288 | 28 | 153-10 | 156 | Gln-1 to Gly-25. | AR050: 38, AR051: | | |
| | | | | | | | 35, AR054: 33, AR089: | | |
| | | | | | | | 9, AR061: 6 | | |
| | | | | | | | H0521: 109, H0522: | | |
| | | | | | | | 38, L0748: 18, H0445: | | |
| | | | | | | | 16, S0360: 11, H0553: | | |
| | | | | | | | 9, L0771: 8, H0575: 7, | | |
| | | | | | | | L0754: 6, S0358: 5, | | |
| | | | | | | | S0354: 4, L0747: 4, | | |
| | | | | | | | H0638: 3, H0427: 3, | | |
| | | | | | | | H0620: 3, H0039: 3, | | |
| | | | | | | | H0622: 3, H0644: 3, | | |
| | | | | | | | H0090: 3, H0264: 3, | | |
| | | | | | | | L0659: 3, S0374: 3, | | |
| | | | | | | | H0672: 3, H0555: 3, | | |
| | | | | | | | L0743: 3, L0744: 3, | | |
| | | | | | | | L0439: 3, L0740: 3, | | |
| | | | | | | | L0755: 3, H0484: 2, | | |
| | | | | | | | S0376: 2, H0333: 2, | | |
| | | | | | | | H0309: 2, H0009: 2, | | |
| | | | | | | | H0376: 2, H0063: 2, | | |
| | | | | | | | L0769: 2, H0658: 2, | | |
| | | | | | | | L0750: 2, L0779: 2, | | |
| | | | | | | | L0731: 2, L0581: 2, | | |
| | | | | | | | H0506: 2, H0583: 1, | | |
| | | | | | | | H0650: 1, L0418: 1, | | |
| | | | | | | | L0785: 1, S0212: 1, | | |
| | | | | | | | S0282: 1, H0483: 1, | | |
| | | | | | | | H0661: 1, H0663: 1, | | |
| | | | | | | | H0662: 1, L0005. 1, | | |
| | | | | | | | H0619: 1, H0393: 1, | | |
| | | | | | | | H0486: 1, S0280: 1, | | |
| | | | | | | | H0108: 1, H0122: 1, | | |
| | | | | | | | H0581: 1, H0052: 1, | | |
| | | | | | | | H0597: 1, H0570: 1, | | |
| | | | | | | | H0123: 1, H0023: 1, | | |
| | | | | | | | H0014: 1, S0362: 1, | | |
| | | | | | | | H0083: 1, H0067: 1, | | |
| | | | | | | | H0510: 1, H0375: 1, | | |
| | | | | | | | S0250: 1, H0252: 1, | | |
| | | | | | | | H0213: 1, H0031: 1, | | |
| | | | | | | | H0189: 1, H0068: 1, | | |
| | | | | | | | H0163: 1, H0062: 1, | | |
| | | | | | | | L0435: 1, H0509: 1, | | |
| | | | | | | | H0652: 1, L0646: 1, | | |
| | | | | | | | L0765: 1, L0773: 1, | | |
| | | | | | | | L0648: 1, L0768: 1, | | |
| | | | | | | | L0649: 1, L0775: 1, | | |
| | | | | | | | L0375: 1, L0378: 1, | | |
| | | | | | | | L0805: 1, L0776: 1, | | |
| | | | | | | | L0559: 1, L0789: 1, | | |
| | | | | | | | L0666: 1, L0664: 1, | | |
| | | | | | | | L0352: 1, H0682: 1, | | |
| | | | | | | | H0666: 1, H0539: 1, | | |
| | | | | | | | S0378: 1, S0190: 1, | | |
| | | | | | | | H0345: 1, L0751: 1, | | |
| | | | | | | | L0749: 1, L0758: 1, | | |
| | | | | | | | L0759: 1, H0444: 1, | | |
| | | | | | | | H0343: 1, H0595: 1, | | |
| | | | | | | | S0106: 1, H0668: 1, | | |
| | | | | | | | H0542: 1, H0422: 1, | | |
| | | | | | | | S0384: 1 and H0352: 1. | | |
| 19 | HDTAA31 | 1128968 | 29 | 674-1075 | 157 | | AR059: H, AR061: 4 | | |
| | | | | | | | H0486: 1 and L0779: | | |
| | | | | | | | 1. | | |
| | | 937609 | 103 | 1100-1432 | 231 | Arg-3 to Asp-9, | | | |
| | | | | | | Pro-49 to Gly-54, | | | |
| | | | | | | Ser-65 to His-70, | | | |
| | | | | | | Lys-78 to Lys-111. | | | |
| | | 941948 | 104 | 1100-1432 | 232 | Arg-3 to Asp-9, | | | |
| | | | | | | Pro-49 to Gly-54, | | | |
| | | | | | | Ser-65 to His-70, | | | |
| | | | | | | Lys-78 to Lys-111. | | | |
| 20 | HDTFW91 | 1151470 | 30 | 324-85 | 158 | Pro-S9 to Asn-64, | AR089: 15, AR061: 6 | | |
| | | | | | | Tyr-72 to Cys-80. | L0777: 6, H0265: 5, | | |
| | | | | | | | L0439: 4, L0751: 4, | | |
| | | | | | | | H0556: 3, L0768: 3, | | |
| | | | | | | | L0766: 3, H0520: 3, | | |
| | | | | | | | L0485: 3, H0662: 2, | | |
| | | | | | | | H0069: 2, L0763: 2, | | |
| | | | | | | | L0372: 2, L0647: 2, | | |
| | | | | | | | L0666: 2, L0757: 2, | | |
| | | | | | | | L0362: 2, S0040: 1, | | |
| | | | | | | | S0134: 1, H0656: 1, | | |
| | | | | | | | S0212: 1, H0483: 1, | | |
| | | | | | | | S0418: 1, S0354: 1, | | |
| | | | | | | | S0358: 1, S0046: 1, | | |
| | | | | | | | S0222: 1, H0587: 1, | | |
| | | | | | | | H0486: 1, L0021: 1, | | |
| | | | | | | | H0575. 1, H0590. 1, | | |
| | | | | | | | T0115: 1, H0050: 1, | | |
| | | | | | | | S0050: 1, H0014: 1, | | |
| | | | | | | | H0373: 1, T0010: 1, | | |
| | | | | | | | H0266: 1, H0292: 1, | | |
| | | | | | | | H0039: 1, S0036: 1, | | |
| | | | | | | | H0135: 1, H0264: 1, | | |
| | | | | | | | H0488: 1, L0351: 1, | | |
| | | | | | | | H0494: 1, H0646: 1, | | |
| | | | | | | | L0770: 1, L0769: 1, | | |
| | | | | | | | L0639: 1, L0641: 1, | | |
| | | | | | | | L0774: 1, L0663: 1, | | |
| | | | | | | | S0374: 1, H0519: 1, | | |
| | | | | | | | L0779: 1, H0668: 1, | | |
| | | | | | | | H0665: 1 and H0543: 1. | | |
| | | 761627 | 105 | 463-621 | 233 | Phe-10 to Lys-49. | | | |
| 21 | HEQBP52 | 1151473 | 31 | 521-318 | 159 | | AR089: 8, AR061: 1 | | |
| | | | | | | | H0599: 4, L0731: 4, | | |
| | | | | | | | L0777: 3, S0026: 3, | | |
| | | | | | | | H0373: 2, L0783: 2, | | |
| | | | | | | | H0659: 2, L0744: 2, | | |
| | | | | | | | L0752: 2, L0758: 2, | | |
| | | | | | | | L0759: 2, H0624: 1, | | |
| | | | | | | | S0420: 1, S0356: 1, | | |
| | | | | | | | S0360: 1, H0393: 1, | | |
| | | | | | | | H0369: 1, H0574: 1, | | |
| | | | | | | | T0039: 1, S0280: 1, | | |
| | | | | | | | H0575: 1, H0122: 1, | | |
| | | | | | | | H0581: 1, H0085: 1, | | |
| | | | | | | | H0544: 1, T0003: 1, | | |
| | | | | | | | S0051: 1, H0375: 1, | | |
| | | | | | | | H0179: 1, S0250: 1, | | |
| | | | | | | | S0003: 1, S0022: 1, | | |
| | | | | | | | S0364: 1, H0163: 1, | | |
| | | | | | | | H0412: 1, H0413: 1, | | |
| | | | | | | | H0509: 1, H0538: 1, | | |
| | | | | | | | L0766: 1, L0809: 1, | | |
| | | | | | | | H0144: 1, S0126: 1, | | |
| | | | | | | | H0660: 1, S0013: 1, | | |
| | | | | | | | L0748: 1, L0747: 1, | | |
| | | | | | | | H0595: 1, L0588: 1, | | |
| | | | | | | | S0192: 1, S0242: 1, | | |
| | | | | | | | S0196: 1, H0543: 1 and | | |
| | | | | | | | S0424: 1. | | |
| | | 734673 | 106 | 1-117 | 234 | | | | |
| | | 919171 | 107 | 1527-1766 | 235 | Phe-16 to Trp-21, | | | |
| | | | | | | Lys-50 to Lys-75. | | | |
| 22 | HFKIE07 | 1219610 | 32 | 260-613 | 160 | Ser-1 to Arg-17, | AR061: 4, AR089: 3 | | |
| | | | | | | Arg-71 to Ala-76, | L0751: 10, H0620: 7, | | |
| | | | | | | Ser-107 to Lys-118. | L0439: 7, L0749: 7, | | |
| | | | | | | | H0144: 4, L0438: 4, | | |
| | | | | | | | H0549: 3, L0769: 3, | | |
| | | | | | | | L0663: 3, L0748: 3, | | |
| | | | | | | | L0750: 3, L0601: 3, | | |
| | | | | | | | S0360: 2, L0717: 2, | | |
| | | | | | | | H0013: 2, H0687: 2, | | |
| | | | | | | | L0803: 2, L0805: 2, | | |
| | | | | | | | L0776: 2, L0809: 2, | | |
| | | | | | | | S0152: 2, L0747: 2, | | |
| | | | | | | | S0282: 1, H0638: 1, | | |
| | | | | | | | S0354: 1, S0358: 1, | | |
| | | | | | | | S0132: 1, H0586: 1, | | |
| | | | | | | | H0156: 1, L0157: 1, | | |
| | | | | | | | H0172: 1, H0428: 1, | | |
| | | | | | | | H0213: 1, H0135: 1, | | |
| | | | | | | | H0087: 1, H0264: 1, | | |
| | | | | | | | H0538: 1, L0625: 1, | | |
| | | | | | | | L0763: 1, L0800: 1, | | |
| | | | | | | | L0363: 1, L0794: 1, | | |
| | | | | | | | L0650: 1, L0659: 1, | | |
| | | | | | | | L0789: 1, L0790: 1, | | |
| | | | | | | | L0665: 1, H0520: 1, | | |
| | | | | | | | H0519: 1, H0435: 1, | | |
| | | | | | | | S0330: 1, S0136: 1, | | |
| | | | | | | | H0521: 1, H0522: 1, | | |
| | | | | | | | L0593: 1 and H0506: 1. | | |
| | | 969034 | 108 | 260-1381 | 236 | Ser-1 to Arg-17, | | | |
| | | | | | | Arg-71 to Ala-76, | | | |
| | | | | | | Lys-119 to Ser-126, | | | |
| | | | | | | Pro-133 to Asp-183, | | | |
| | | | | | | Lys-248 to Gly-255, | | | |
| | | | | | | Gln-282 to Glu-289, | | | |
| | | | | | | Pro-3 17 to Cys-322. | | | |
| 23 | HHAMC07 | 1151480 | 33 | 295-83 | 161 | Phe-39 to Asp-48. | AR089: H, AR061: 5 | | |
| | | | | | | | L0751: 3, L0769: 2, | | |
| | | | | | | | S0134: 1, H0509: 1, | | |
| | | | | | | | S0422: 1, L0387: 1, | | |
| | | | | | | | L0790: 1 and H0521: 1. | | |
| | | 952286 | 109 | 182-304 | 237 | Lys-8 to Gly-40. | | | |
| 24 | HHBEG80 | 951688 | 34 | 284-442 | 162 | Ser-11 to Cys-26, | AR089: 21, AR061: 7 | | |
| | | | | | | Lys-30 to Lys-53. | H0373: 1 and L0731: | | |
| | | | | | | | 1. | | |
| 25 | HHBEM70 | 756949 | 35 | 45-242 | 163 | | AR089: 3, AR061: 1 | | |
| | | | | | | | H0373: 3 | | |
| 26 | HHEQE88 | 1151485 | 36 | 76-225 | 164 | Lys-30 to Lys-50. | AR089: 9, AR061: 4 | | |
| | | | | | | | L0805: 2, L0779: 2, | | |
| | | | | | | | L0777: 2, H0486: 1, | | |
| | | | | | | | S0280: 1, H0318: 1, | | |
| | | | | | | | H0674: 1, L0764: 1, | | |
| | | | | | | | L0804: 1, L0775: 1, | | |
| | | | | | | | L0783: 1, L0789: 1, | | |
| | | | | | | | L0743: 1, L0747: 1, | | |
| | | | | | | | L0480: 1, S0242: 1 and | | |
| | | | | | | | H0543: 1. | | |
| | | 754998 | 110 | 43-231 | 238 | Lys-30 to Lys-61. | | | |
| 27 | HHSFC32 | 1053062 | 37 | 2-184 | 165 | | AR089: 12, AR061: 9 | | |
| | | | | | | | L0439: 9, L0740: 3, | | |
| | | | | | | | L0777: 3, L0805: 2, | | |
| | | | | | | | L0748: 2, H0170: 1, | | |
| | | | | | | | S6026: 1, L0394: 1, | | |
| | | | | | | | H0441: 1, S0388: 1, | | |
| | | | | | | | S0352: 1, L0662: 1, | | |
| | | | | | | | L0803: 1, L0775: 1, | | |
| | | | | | | | L0776: 1, L0792: 1, | | |
| | | | | | | | L0438: 1, L0749: 1, | | |
| | | | | | | | L0759: 1 and S0412: 1. | | |
| | | 698657 | 111 | 319-474 | 239 | | | | |
| 28 | HHSFI32 | 1151488 | 38 | 184-2 | 166 | Glu-1 to Cys-8, | AR089: 16, AR061: 10 | | |
| | | | | | | Arg-42 to Lys-48. | L0731: 9, L0752: 8, | | |
| | | | | | | | L0769: 6, L0740: 6, | | |
| | | | | | | | L0749: 6, L0766: 5, | | |
| | | | | | | | L0775: 5, L0747: 5, | | |
| | | | | | | | S0358: 4, L0764: 4, | | |
| | | | | | | | L0776: 4, L0757: 4, | | |
| | | | | | | | L0666: 3, L0665: 3, | | |
| | | | | | | | S0328: 3, L0748: 3, | | |
| | | | | | | | L0439: 3, L0779: 3, | | |
| | | | | | | | L0759: 3, H0052: 2, | | |
| | | | | | | | H0178: 2, L0471: 2, | | |
| | | | | | | | H0361: 2, H0038: 2, | | |
| | | | | | | | L0598: 2, L0763: 2, | | |
| | | | | | | | L0771: 2, L0804: 2, | | |
| | | | | | | | L0774: 2, L0375: 2, | | |
| | | | | | | | L0805: 2, L0782: 2, | | |
| | | | | | | | L0663: 2, L0743: 2, | | |
| | | | | | | | L0751: 2, L0754: 2, | | |
| | | | | | | | L0756: 2, L0596: 2, | | |
| | | | | | | | L0595: 2, L0362: 2, | | |
| | | | | | | | L0361: 2, S0196: 2, | | |
| | | | | | | | H0624: 1, H0171: 1, | | |
| | | | | | | | H0265: 1, S0114: 1, | | |
| | | | | | | | T0049: 1, H0583: 1, | | |
| | | | | | | | S0282: 1, H0176: 1, | | |
| | | | | | | | H0638: 1, S0418: 1, | | |
| | | | | | | | S0420: 1, S0356: 1, | | |
| | | | | | | | H0580: 1, H0393: 1, | | |
| | | | | | | | H0441: 1, H0592: 1, | | |
| | | | | | | | H0586: 1, H0333: 1, | | |
| | | | | | | | H0574: 1, H0486: 1, | | |
| | | | | | | | H0069: 1, S0280: 1, | | |
| | | | | | | | H0599: 1, H0505: 1, | | |
| | | | | | | | S0474: 1, L0109: 1, | | |
| | | | | | | | H0263: 1, H0041: 1, | | |
| | | | | | | | S0388: 1, S0051: 1, | | |
| | | | | | | | S6028: 1, H0292: 1, | | |
| | | | | | | | S0214: 1, H0252: 1, | | |
| | | | | | | | H0039: 1, S0368: 1, | | |
| | | | | | | | H0030: 1, H0212: 1, | | |
| | | | | | | | S0366: 1, H0598: 1, | | |
| | | | | | | | S0036: 1, H0616: 1, | | |
| | | | | | | | H0412: 1, S0450: 1, | | |
| | | | | | | | H0509: 1, L0770: 1, | | |
| | | | | | | | L0638: 1, L0796: 1, | | |
| | | | | | | | L0373: 1, L0645: 1, | | |
| | | | | | | | L0521: 1, L0662: 1, | | |
| | | | | | | | L0768: 1, L0803: 1, | | |
| | | | | | | | L0659: 1, L0518: 1, | | |
| | | | | | | | L0383: 1, L0789: 1, | | |
| | | | | | | | L0664: 1, H0144: 1, | | |
| | | | | | | | H0659: 1, H0660: 1, | | |
| | | | | | | | H0539: 1, S0380: 1, | | |
| | | | | | | | H0696: 1, S0406: 1, | | |
| | | | | | | | S3014: 1, S0027: 1, | | |
| | | | | | | | L0755: 1, H0595: 1, | | |
| | | | | | | | S0434: 1, L0591: 1, | | |
| | | | | | | | L0599: 1, S0026: 1, | | |
| | | | | | | | H0665: 1, S0194: 1, | | |
| | | | | | | | H0543: 1, H0008: 1 and | | |
| | | | | | | | H0352: 1. | | |
| | | 965149 | 112 | 106-246 | 240 | Phe-19 to Lys-46. | | | |
| 29 | HJABA68 | 1150871 | 39 | 595-915 | 167 | | AR061: 4, AR059: 4 | | |
| | | | | | | | L0756: 4, L0777: 4, | | |
| | | | | | | | H0580: 2, S0422: 2, | | |
| | | | | | | | L0766: 2, H0656: 1, | | |
| | | | | | | | H0411: 1, H0581: 1, | | |
| | | | | | | | H0565: 1, H0412: 1, | | |
| | | | | | | | T0041: 1, L0637: 1, | | |
| | | | | | | | L0375: 1, L0666: 1, | | |
| | | | | | | | L0663: 1, L0352: 1, | | |
| | | | | | | | H0547: 1, L0779: 1, | | |
| | | | | | | | L0366: 1, S0192: 1 and | | |
| | | | | | | | H0423: 1. | | |
| | | 868322 | 113 | 1134-1385 | 241 | Thr-43 to Cys-49, | | | |
| | | | | | | Tyr-51 to Lys-81. | | | |
| 30 | HLDOX35 | 1151493 | 40 | 288-1 | 168 | Met-25 to Arg-50, | AR089: 13, AR061: 7 | | |
| | | | | | | Arg-64 to Ser-71. | L0745: 30, L0751: 9, | | |
| | | | | | | | L0747: 6, H0617: 5, | | |
| | | | | | | | L0774: 5, L0809: 5, | | |
| | | | | | | | L0749: 5, L0779: 5, | | |
| | | | | | | | L0776: 4, L0746: 4, | | |
| | | | | | | | S0358: 3, S0360: 3, | | |
| | | | | | | | S0410: 3, H0360: 3, | | |
| | | | | | | | H0486: 3, L0764: 3, | | |
| | | | | | | | L0665: 3, S0380: 3, | | |
| | | | | | | | L0742: 3, L0754: 3, | | |
| | | | | | | | L0777: 3, L0361: 3, | | |
| | | | | | | | S0376: 2, L0717: 2, | | |
| | | | | | | | H0549: 2, H0510: 2, | | |
| | | | | | | | H0594: 2, H0623: 2, | | |
| | | | | | | | L0796: 2, L0662: 2, | | |
| | | | | | | | L0803: 2, L0783: 2, | | |
| | | | | | | | L0612: 2, L0743: 2, | | |
| | | | | | | | L0750: 2, L0752: 2, | | |
| | | | | | | | L0731: 2, L0758: 2, | | |
| | | | | | | | L0759: 2, H0265: 1, | | |
| | | | | | | | H0556: 1, H0484: 1, | | |
| | | | | | | | H0483: 1, H0661: 1, | | |
| | | | | | | | H0664: 1, H0662: 1, | | |
| | | | | | | | S0354: 1, H0675: 1, | | |
| | | | | | | | H0370: 1, H0333: 1, | | |
| | | | | | | | H0493: 1, H0257: 1, | | |
| | | | | | | | L0623: 1, H0599: 1, | | |
| | | | | | | | H0575: 1, H0052: 1, | | |
| | | | | | | | H0231: 1, H0545: 1, | | |
| | | | | | | | H0009: 1, H0012: 1, | | |
| | | | | | | | H0620: 1, L0163: 1, | | |
| | | | | | | | H0083: 1, H0375: 1, | | |
| | | | | | | | H0099: 1, H0188: 1, | | |
| | | | | | | | H0687: 1, H0615: 1, | | |
| | | | | | | | H0688: 1, H0213: 1, | | |
| | | | | | | | H0606: 1, H0598: 1, | | |
| | | | | | | | H0038: 1, T0067: 1, | | |
| | | | | | | | S0112: 1, L0770: 1, | | |
| | | | | | | | L0769: 1, L0641: 1, | | |
| | | | | | | | L0648: 1, L0649: 1, | | |
| | | | | | | | L0804: 1, L0775: 1, | | |
| | | | | | | | L0806: 1, L0805: 1, | | |
| | | | | | | | L0657: 1, L0659: 1, | | |
| | | | | | | | L0518: 1, L0382: 1, | | |
| | | | | | | | L0789: 1, L0792: 1, | | |
| | | | | | | | H0144: 1, H0547: 1, | | |
| | | | | | | | H0435: 1, H0658: 1, | | |
| | | | | | | | H0660: 1, H0539: 1, | | |
| | | | | | | | S0136: 1, H0696: 1, | | |
| | | | | | | | S0044: 1, S0406: 1, | | |
| | | | | | | | H0631: 1, L0744: 1, | | |
| | | | | | | | L0748: 1, L0439: 1, | | |
| | | | | | | | L0755: 1, L0757: 1, | | |
| | | | | | | | H0445: 1, L0593: 1, | | |
| | | | | | | | S0192: 1, H0543: 1, | | |
| | | | | | | | S0424: 1 and H0008: 1. | | |
| | | 831549 | 114 | 144-362 | 242 | Lys-38 to Lys-73. | | | |
| 31 | HLYCF37 | 949401 | 41 | 1018-1341 | 169 | His-1 to Gly-23, | AR089: 31, AR061: 5 | | |
| | | | | | | Arg-43 to Leu-50, | H0445: 1 | | |
| | | | | | | Pro-52 to Glu-59, | | | |
| | | | | | | Leu-77 to Lys-108. | | | |
| 32 | HLY11K34 | 1151496 | 42 | 264-1 | 170 | Glu-51 to Ala-63. | AR089: 1, AR061: 1 | | |
| | | | | | | | L0766: 1, L0754: 1 and | | |
| | | | | | | | H0445: 1. | | |
| | | 703776 | 115 | 298-519 | 243 | Lys-37 to Lys-71. | | | |
| 33 | HMUAB01 | 1151502 | 43 | 1-150 | 171 | Asp-17 to Tyr-22. | AR089: 2, AR061: 1 | | |
| | | | | | | | H0376: 1, H0529: 1, | | |
| | | | | | | | L0667: 1, H0518: 1 and | | |
| | | | | | | | H0543: 1. | | |
| | | 926729 | 116 | 227-388 | 244 | | | | |
| 34 | HMVDU16 | 1105310 | 44 | 895-671 | 172 | Arg-9 to Phe-14. | AR050: 16, AR051: 2, | | |
| | | | | | | | AR089: 2, AR061: 1, | | |
| | | | | | | | AR054: 1 | | |
| | | | | | | | L0748: 4 and S0212: 2. | | |
| | | 904807 | 117 | 1120-1341 | 245 | Pro-22 to Ser-28, | | | |
| | | | | | | Thr-43 to Lys-74. | | | |
| 35 | HOGCL27 | 944819 | 45 | 233-424 | 173 | Arg-9 to Arg-18, | AR089: 8, AR061: 4 | | |
| | | | | | | Gly-46 to Tyr-53. | H0581: 1, L0809: 1, | | |
| | | | | | | | H0144: 1, H0435: 1, | | |
| | | | | | | | S0378: 1, L0748: 1, | | |
| | | | | | | | L0777: 1 and L0731: 1. | | |
| | | 963291 | 118 | 56-181 | 246 | | | | |
| 36 | HOSED04 | 1162657 | 46 | 231-1 | 174 | Asn-2 to Cys-22, | AR061: 4, AR089: 4 | | |
| | | | | | | His-49 to Asn-54, | S0114: 1, S0214: 1 and | | |
| | | | | | | Pro-67 to Lys-72. | S0190: 1. | | |
| | | 615209 | 119 | 254-3 | 247 | | | | |
| 37 | HOVAP01 | 1150835 | 47 | 315-70 | 175 | | AR089: 7, AR061: 4 | | |
| | | | | | | | H0306: 1 and H0428: | | |
| | | | | | | | 1. | | |
| | | 693308 | 120 | 198-290 | 248 | Glu-3 to Lys-30. | | | |
| 38 | HPCPN11 | 1179757 | 48 | 220-2 | 176 | Ser-38 to Tyr-65. | AR089: 2, AR061: 1 | | |
| | | | | | | | H0208: 1, L0040: 1, | | |
| | | | | | | | H0634: 1, L0776: 1, | | |
| | | | | | | | H0659: 1 and L0359: 1. | | |
| | | 965420 | 121 | 212-382 | 249 | Leu-30 to Lys-53. | | | |
| 39 | HPLAS10 | 503774 | 49 | 189-1 | 177 | Pro-1 to Arg-6, | AR089: 0, AR061: 0 | | |
| | | | | | | Lys-40 to Lys-59. | H0046: 3, L0754: 3, | | |
| | | | | | | | L0748: 2, L0750: 2, | | |
| | | | | | | | S0376: 1, H0178: 1, | | |
| | | | | | | | H0030: 1, L0769: 1, | | |
| | | | | | | | L0643: 1, L0438: 1, | | |
| | | | | | | | L0740: 1, L0749: 1, | | |
| | | | | | | | L0756: 1, L0752: 1 and | | |
| | | | | | | | L0608: 1. | | |
| 40 | HPQCK13 | 978564 | 50 | 221-42 | 178 | | AR089: 34, AR061: 11 | | |
| | | | | | | | S0136: 2 | | |
| | | 656324 | 122 | 110-220 | 250 | Thr-14 to Lys-36. | | | |
| 41 | HSVAJ47 | 1193053 | 51 | 3-218 | 179 | Glu-53 to Lys-72. | AR089: 4, AR061: 3 | | |
| | | | | | | | L0599: 12, L0766: 11, | | |
| | | | | | | | L0754: 8, L0803: 2, | | |
| | | | | | | | L0809: 2, L0743: 2, | | |
| | | | | | | | L0731: 2, H0624: 1, | | |
| | | | | | | | H0171: 1, S0040: 1, | | |
| | | | | | | | H0650: 1, H0656: 1, | | |
| | | | | | | | S0298: 1, S0282: 1, | | |
| | | | | | | | H0580: 1, S0046: 1, | | |
| | | | | | | | S0222: 1, H0431: 1, | | |
| | | | | | | | H0587: 1, H0486: 1, | | |
| | | | | | | | S0010: 1, H0318: 1, | | |
| | | | | | | | H0581: 1, H0309: 1, | | |
| | | | | | | | H0416: 1, T0006: 1, | | |
| | | | | | | | H0063: 1, T0041: 1, | | |
| | | | | | | | H0560: 1, S0422: 1, | | |
| | | | | | | | S0002: 1, L0641: 1, | | |
| | | | | | | | L0363: 1, L0523: 1, | | |
| | | | | | | | L0659: 1, L0666: 1, | | |
| | | | | | | | H0547: 1, H0539: 1, | | |
| | | | | | | | S0152: 1, H0521: 1, | | |
| | | | | | | | L0758: 1, S0242: 1, | | |
| | | | | | | | H0543: 1 and H0423: 1. | | |
| | | 925849 | 123 | 3-590 | 251 | | | | |
| 42 | HSYDH59 | 1151513 | 52 | 652-482 | 180 | | AR089: 2, AR061: 1 | | |
| | | | | | | | S0358: 3, L0803: 3, | | |
| | | | | | | | H0551: 2, L0663: 2, | | |
| | | | | | | | H0662: 1, H0580: 1, | | |
| | | | | | | | L0717: 1, H0587: 1, | | |
| | | | | | | | H0632: 1, L0021: 1, | | |
| | | | | | | | S0051: 1, L0646: 1, | | |
| | | | | | | | L0521: 1, L0649: 1, | | |
| | | | | | | | L0656: 1, L0659: 1, | | |
| | | | | | | | L0666: 1, L0665: 1, | | |
| | | | | | | | H0547: 1, H0659: 1, | | |
| | | | | | | | H0670: 1, H0648: 1, | | |
| | | | | | | | S0330: 1, L0754: 1, | | |
| | | | | | | | L0745: 1 and L0594: 1. | | |
| | | 957745 | 124 | 1119-1289 | 252 | Lys-24 to Lys-51. | | | |
| 43 | HTTEV13 | 1165306 | 53 | 1246-1025 | 181 | Asp-32 to Gln-42, | AR089: 7, AR061: 3 | | |
| | | | | | | Met-58 to Ser-74. | L0748: 13, L0747: 6, | | |
| | | | | | | | L0749: 6, L0803: 4, | | |
| | | | | | | | L0752: 4, L0731: 3, | | |
| | | | | | | | L0759: 3, L0667: 2, | | |
| | | | | | | | L0764: 2, L0804: 2, | | |
| | | | | | | | L0774: 2, L0806: 2, | | |
| | | | | | | | L0527: 2, L0666: 2, | | |
| | | | | | | | H0478: 2, L0755: 2, | | |
| | | | | | | | L0758: 2, S0360: 1, | | |
| | | | | | | | H0580: 1, S0045: 1, | | |
| | | | | | | | H0427: 1, H0318: 1, | | |
| | | | | | | | H0581: 1, L0040: 1, | | |
| | | | | | | | 40687: 1, H0615: 1, | | |
| | | | | | | | H0628: 1, H0090: 1, | | |
| | | | | | | | H0040: 1, S0344: 1, | | |
| | | | | | | | L0520: 1, L0763: 1, | | |
| | | | | | | | L0770: 1, L0372: 1, | | |
| | | | | | | | L0646: 1, L0773: 1, | | |
| | | | | | | | L0648: 1, L0775: 1, | | |
| | | | | | | | L0375: 1, L0805: 1, | | |
| | | | | | | | L0776: 1, H0659: 1, | | |
| | | | | | | | S0380: 1, L0740: 1, | | |
| | | | | | | | L0750: 1 and L0608: 1. | | |
| | | 868402 | 125 | 1104-1301 | 253 | Val-13 to Tyr-18, | | | |
| | | | | | | Lys-38 to Lys-64. | | | |
| 44 | HTWCG65 | 1150839 | 54 | 305-3 | 182 | Asn-41 to Glu-57, | AR089: 1, AR061: 0 | | |
| | | | | | | Ala-66 to Asn-74, | H0650: 1 and H0436: | | |
| | | | | | | Arg-84 to Pro-101. | 1. | | |
| | | 869547 | 126 | 115-312 | 254 | Lys-31 to Lys-47. | | | |
| 45 | HULAI37 | 1081031 | 55 | 174-1 | 183 | Ser-44 to Pro-58. | AR061: 0, AR089: 0 | | |
| | | | | | | | H0530: 6 | | |
| | | 708923 | 127 | 72-173 | 255 | Leu-9 to Lys-34. | | | |
| 46 | HUSXZ80 | 1164015 | 56 | 266-93 | 184 | Ile-32 to Glu-40, | AR089: 1, AR061: 1 | | |
| | | | | | | Lys-49 to Thr-58. | L0803: 7, L0662: 3, | | |
| | | | | | | | L0766: 3, L0665: 3, | | |
| | | | | | | | L0759: 3, L0646: 2, | | |
| | | | | | | | L0521: 2, L0806: 2, | | |
| | | | | | | | L0663: 2, S0418: 1, | | |
| | | | | | | | H0411: 1, H0635: 1, | | |
| | | | | | | | H0041: 1, H0674: 1, | | |
| | | | | | | | H0087: 1, H0413: 1, | | |
| | | | | | | | L0762: 1, L0763: 1, | | |
| | | | | | | | L0761: 1, L0794: 1, | | |
| | | | | | | | L0653: 1, L0655: 1, | | |
| | | | | | | | L0661: 1, L0526: 1, | | |
| | | | | | | | L0666: 1, L0664: 1, | | |
| | | | | | | | H0690: 1, H0672: 1, | | |
| | | | | | | | H0521: 1, L0754: 1, | | |
| | | | | | | | L0755: 1, L0599: 1 and | | |
| | | | | | | | L0608: 1. | | |
| | | 917002 | 128 | 125-316 | 256 | Lys-37 to Lys-60. | | | |
| 47 | HUSYN11 | 1150840 | 57 | 128-316 | 185 | Pro-21 to Lys-63. | AR089: 11, AR061: 9 | | |
| | | | | | | | H0413: 1 | | |
| | | 943237 | 129 | 133-360 | 257 | Pro-21 to Lys-63. | | | |
| 48 | HVAEI40 | 1151525 | 58 | 224-75 | 186 | Thr-29 to Ser-34. | AR089: 1, AR061: 0 | | |
| | | | | | | | S0378: 2, L0752: 2, | | |
| | | | | | | | S0360: 1, L0804: 1 and | | |
| | | | | | | | H0521: 1. | | |
| | | 969204 | 130 | 429-563 | 258 | Pro-13 to Lys-44. | | | |
| 49 | HVAET61 | 1151526 | 59 | 583-404 | 187 | Leu-32 to Phe-47. | AR089: 74, AR061: 66 | | |
| | | | | | | | S0378: 3, L0776: 2, | | |
| | | | | | | | L0805: 1, L0809: 1 and | | |
| | | | | | | | L0789: 1. | | |
| | | 965365 | 131 | 438-698 | 259 | Ile-1 to Asn-8. | | | |
| 50 | HWLBU68 | 1151535 | 60 | 360-148 | 188 | Met-45 to Lys-54, | AR061: 37, AR089: 31 | | |
| | | | | | | Gln-65 to Ile-71. | S0010: 15, H0013: 13, | | |
| | | | | | | | L0757: 10, H0144: 9, | | |
| | | | | | | | L0439: 9, L0747: 9, | | |
| | | | | | | | L0659: 8, L0605: 8, | | |
| | | | | | | | L0438: 7, S0330: 7, | | |
| | | | | | | | S0027: 7, L0740: 7, | | |
| | | | | | | | L0604: 7, L0601: 7, | | |
| | | | | | | | S0346: 6, H0052: 6, | | |
| | | | | | | | L0662: 6, L0776: 6, | | |
| | | | | | | | S0126: 6, S3014: 6, | | |
| | | | | | | | L0754: 6, S0212: 5, | | |
| | | | | | | | S0360: 5, S0007: 5, | | |
| | | | | | | | L0766: 5, L0775: 5, | | |
| | | | | | | | L0666: 5, S0374: 5, | | |
| | | | | | | | L0748: 5, S0260: 5, | | |
| | | | | | | | L0592: 5, L0599: 5, | | |
| | | | | | | | H0624: 4, S0222: 4, | | |
| | | | | | | | H0156: 4, L0471: 4, | | |
| | | | | | | | S0344: 4, L0769: 4, | | |
| | | | | | | | L0745: 4, L0750: 4, | | |
| | | | | | | | L0731: 4, L0594: 4, | | |
| | | | | | | | S0026: 4, H0295: 3, | | |
| | | | | | | | H0402: 3, S0420: 3, | | |
| | | | | | | | H0580: 3, H0486: 3, | | |
| | | | | | | | H0266: 3, S0003: 3, | | |
| | | | | | | | H0494: 3, S0142: 3, | | |
| | | | | | | | L0794: 3, L0803: 3, | | |
| | | | | | | | L0664: 3, H0547: 3, | | |
| | | | | | | | S0328: 3, S3012: 3, | | |
| | | | | | | | S0028: 3, L0759: 3, | | |
| | | | | | | | L0596: 3, L0589: 3, | | |
| | | | | | | | S0192: 3, S0194: 3, | | |
| | | | | | | | H0170: 2, H0171: 2, | | |
| | | | | | | | S0001: 2, S0282: 2, | | |
| | | | | | | | H0661: 2, L0005: 2, | | |
| | | | | | | | S0358: 2, H0393: 2, | | |
| | | | | | | | S0278: 2, S6022: 2, | | |
| | | | | | | | H0438: 2, H0586: 2, | | |
| | | | | | | | H0194: 2, H0546: 2, | | |
| | | | | | | | H0457: 2, H0373: 2, | | |
| | | | | | | | H0051: 2, S0051: 2, | | |
| | | | | | | | H0083: 2, S6028: 2, | | |
| | | | | | | | S0214: 2, H0328: 2, | | |
| | | | | | | | H0628: 2, H0032: 2, | | |
| | | | | | | | H0169: 2, S0036: 2, | | |
| | | | | | | | H0551: 2, S0038: 2, | | |
| | | | | | | | H0646: 2, L0763: 2, | | |
| | | | | | | | L0770: 2, L0667: 2, | | |
| | | | | | | | L0768: 2, L0650: 2, | | |
| | | | | | | | L0774: 2, L0651: 2, | | |
| | | | | | | | L0517: 2, L0789: 2, | | |
| | | | | | | | H0522: 2, S0044: 2, | | |
| | | | | | | | L0758: 2, L0587: 2, | | |
| | | | | | | | L0588: 2, L0581: 2, | | |
| | | | | | | | H0653: 2, S0040: 1, | | |
| | | | | | | | S0342: 1, H0294: 1, | | |
| | | | | | | | T0049: 1, H0650: 1, | | |
| | | | | | | | H0657: 1, H0663: 1, | | |
| | | | | | | | H0662: 1, H0638: 1, | | |
| | | | | | | | S0354: 1, S0376: 1, | | |
| | | | | | | | S0410: 1, H0229: 1, | | |
| | | | | | | | S0045: 1, S0132: 1, | | |
| | | | | | | | L0717: 1, H0261: 1, | | |
| | | | | | | | H0549: 1, S6014: 1, | | |
| | | | | | | | H0431: 1, H0409: 1, | | |
| | | | | | | | H0600: 1, H0331: 1, | | |
| | | | | | | | L0622: 1, T0039: 1, | | |
| | | | | | | | T0040: 1, H0244: 1, | | |
| | | | | | | | H0427: 1, H0002: 1, | | |
| | | | | | | | H0575: 1, H0390: 1, | | |
| | | | | | | | T0048: 1, H0421: 1, | | |
| | | | | | | | S0049: 1, H0251: 1, | | |
| | | | | | | | H0596: 1, T0110: 1, | | |
| | | | | | | | H0545: 1, H0123: 1, | | |
| | | | | | | | H0233: 1, H0014: 1, | | |
| | | | | | | | H0201: 1, H0107: 1, | | |
| | | | | | | | T0010: 1, H0188: 1, | | |
| | | | | | | | H0292: 1, H0028: 1, | | |
| | | | | | | | H0110: 1, S0250: 1, | | |
| | | | | | | | H0252: 1, L0483: 1, | | |
| | | | | | | | T0006: 1, H0674: 1, | | |
| | | | | | | | H0211: 1, H0361: 1, | | |
| | | | | | | | H0090: 1, H0412: 1, | | |
| | | | | | | | H0413: 1, L0564: 1, | | |
| | | | | | | | S0466: 1, H0633: 1, | | |
| | | | | | | | S0210: 1, L0598: 1, | | |
| | | | | | | | L0369: 1, L0371: 1, | | |
| | | | | | | | L0637: 1, L0764: 1, | | |
| | | | | | | | L0771: 1, L0648: 1, | | |
| | | | | | | | L0521: 1, L0363: 1, | | |
| | | | | | | | L0649: 1, L0381: 1, | | |
| | | | | | | | L0388: 1, L0375: 1, | | |
| | | | | | | | L0376: 1, L0806: 1, | | |
| | | | | | | | L0653: 1, L0655: 1, | | |
| | | | | | | | L0657: 1, L0512: 1, | | |
| | | | | | | | L0540: 1, L0526: 1, | | |
| | | | | | | | L0783: 1, L0383: 1, | | |
| | | | | | | | L0382: 1, L0809: 1, | | |
| | | | | | | | L0519: 1, L0647: 1, | | |
| | | | | | | | S0052: 1, S0428: 1, | | |
| | | | | | | | S0053: 1, H0520: 1, | | |
| | | | | | | | H0593: 1, H0659: 1, | | |
| | | | | | | | H0670: 1, S0380: 1, | | |
| | | | | | | | H0518. 1, S0404. 1, | | |
| | | | | | | | H0436: 1, L0744: 1, | | |
| | | | | | | | L0746: 1, L0777: 1, | | |
| | | | | | | | L0752: 1, L0753: 1, | | |
| | | | | | | | L0755: 1, S0031: 1, | | |
| | | | | | | | H0444: 1, L0480: 1, | | |
| | | | | | | | L0485: 1, L0593: 1, | | |
| | | | | | | | L0362: 1, H0668: 1, | | |
| | | | | | | | L0096: 1, S0196: 1, | | |
| | | | | | | | H0542: 1 and H0423: 1. | | |
| | | 757225 | 132 | 171-359 | 260 | Glu-25 to Gly-60. | | | |
| 51 | HWLQB94 | 1077696 | 61 | 2-184 | 189 | | AR089: 1, AR061: 0 | | |
| | | | | | | | S0360: 2 and H0592: 1. | | |
| | | 959664 | 133 | 2-175 | 261 | | | | |
| 52 | HWLQG27 | 1224970 | 62 | 1114-1335 | 190 | Ala-39 to Lys-73. | AR089: 0, AR061: 0 | | |
| | | | | | | | S0360: 1 and H0413: 1. | | |
| | | 953864 | 134 | 28-249 | 262 | Ala-39 to Lys-73. | | | |
| 53 | HWLQZ02 | 918869 | 63 | 1-204 | 191 | Pro-6 to Leu-15, | AR089: 0, AR061: 0 | | |
| | | | | | | Pro-36 to Gly-65. | | | |
| 54 | HWLRB78 | 1151536 | 64 | 69-284 | 192 | Ser-42 to Lys-47, | AR061: 1, AR089: 0 | | |
| | | | | | | Cys-54 to Lys-72. | L0748: 12, L0754: 6, | | |
| | | | | | | | H0638: 5, H0599: 5, | | |
| | | | | | | | H0144: 5, L0745: 5, | | |
| | | | | | | | L0757: 5, L0758: 5, | | |
| | | | | | | | H0591: 4, H0038: 4, | | |
| | | | | | | | L0766: 4, S0380: 4, | | |
| | | | | | | | S0028: 4, L0747: 4, | | |
| | | | | | | | L0755: 4, L0362: 4, | | |
| | | | | | | | S0360: 3, H0581: 3, | | |
| | | | | | | | H0457: 3, H0553: 3, | | |
| | | | | | | | L0759: 3, H0583: 2, | | |
| | | | | | | | H0656: 2, H0580: 2, | | |
| | | | | | | | S0222: 2, H0592: 2, | | |
| | | | | | | | H0013: 2, H0318: 2, | | |
| | | | | | | | S0003: 2, L0483: 2, | | |
| | | | | | | | H0616: 2, H0264: 2, | | |
| | | | | | | | L0764: 2, L0662: 2, | | |
| | | | | | | | L0775: 2, L0805: 2, | | |
| | | | | | | | L0783: 2, L0666: 2, | | |
| | | | | | | | H0689: 2, H0435: 2, | | |
| | | | | | | | H0660: 2, H0521: 2, | | |
| | | | | | | | L0740: 2, H0423: 2, | | |
| | | | | | | | S0040: 1, H0650: 1, | | |
| | | | | | | | H0657: 1, S0116: 1, | | |
| | | | | | | | H0341: 1, H0228: 1, | | |
| | | | | | | | H0208: 1, S0045: 1, | | |
| | | | | | | | H0431: 1, H0611: 1, | | |
| | | | | | | | H0392: 1, T0039: 1, | | |
| | | | | | | | H0002: 1, H0052: 1, | | |
| | | | | | | | L0157: 1, H0105: 1, | | |
| | | | | | | | H0024: 1, H0179: 1, | | |
| | | | | | | | H0271: 1, H0188: 1, | | |
| | | | | | | | H0286: 1, S0022: 1, | | |
| | | | | | | | S0214: 1, H0328: 1, | | |
| | | | | | | | H0615: 1, H0031: 1, | | |
| | | | | | | | H0032: 1, H0068: 1, | | |
| | | | | | | | T0067: 1, T0042: 1, | | |
| | | | | | | | H0494: 1, H0641: 1, | | |
| | | | | | | | H0538: 1, H0529: 1, | | |
| | | | | | | | L0763: 1, L0667: 1, | | |
| | | | | | | | L0773: 1, L0803: 1, | | |
| | | | | | | | L0774: 1, L0651: 1, | | |
| | | | | | | | L0655: 1, L0607: 1, | | |
| | | | | | | | L0807: 1, L0659: 1, | | |
| | | | | | | | L0647: 1, L0663: 1, | | |
| | | | | | | | L0665: 1, S0216: 1, | | |
| | | | | | | | S0374. 1, L0438. 1, | | |
| | | | | | | | H0547: 1, S0126: 1, | | |
| | | | | | | | H0539: 1, S0378: 1, | | |
| | | | | | | | H0518: 1, S0152: 1, | | |
| | | | | | | | H0522: 1, H0694: 1, | | |
| | | | | | | | H0436: 1, H0478: 1, | | |
| | | | | | | | H0479: 1, S0206: 1, | | |
| | | | | | | | L0439: 1, L0777: 1, | | |
| | | | | | | | L0752: 1, L0731: 1, | | |
| | | | | | | | S0260: 1, H0445: 1, | | |
| | | | | | | | L0592: 1, L0599: 1, | | |
| | | | | | | | S0011: 1, H0542: 1, | | |
| | | | | | | | H0543: 1 and L0698: 1. | | |
| | | 918522 | 135 | 292-2 | 263 | Ser-42 to Lys-47, | | | |
| 55 | HWMNB82 | 968643 | 65 | 1-237 | 193 | Cys-54 to Lys-94. | AR089: 0, AR061: 0 | | |
| 56 | HWWFC08 | 1151537 | 66 | 2-484 | 194 | Gly-1 to Gly-20, | AR089: 1, AR061: 0 | | |
| | | | | | | Lys-60 to Gln-66, | H0657: 2, H0135: 2, | | |
| | | | | | | Leu-106 to Gly-114, | L0772: 2, L0646: 2, | | |
| | | | | | | Leu-122 to Leu-129, | L0764: 2, L0663: 2, | | |
| | | | | | | Leu-147 to Lys-161. | S6024: 1, H0637: 1, | | |
| | | | | | | | H0370: 1, L0021: 1, | | |
| | | | | | | | H0546: 1, H0041: 1, | | |
| | | | | | | | H0617: 1, H0166: 1, | | |
| | | | | | | | L0769: 1, L0771: 1, | | |
| | | | | | | | L0662: 1, L0774: 1, | | |
| | | | | | | | L0783: 1, H0682: 1, | | |
| | | | | | | | H0659: 1, H0660: 1, | | |
| | | | | | | | H0651: 1, H0436: 1, | | |
| | | | | | | | L0777: 1 and L0600: 1. | | |
| | | 933752 | 136 | 171-713 | 264 | His-7 to Arg-12. | | | |
| 57 | HWWFY87 | 1192500 | 67 | 478-296 | 195 | Pro-31 to Lys-43. | AR061: 1, AR089: 0 | | |
| | | | | | | | L0766: 2, L0777: 2, | | |
| | | | | | | | L0731: 2, H0657: 1, | | |
| | | | | | | | S0358: 1, L0803: 1, | | |
| | | | | | | | L0792: 1, L0666: 1, | | |
| | | | | | | | L0755: 1 and L0758: 1. | | |
| | | 958226 | 137 | 494-658 | 265 | Asn-15 to Lys-46. | | | |
| 58 | HYAAS55 | 1151540 | 68 | 778-1035 | 196 | Arg-55 to Ile-61, | AR089: 6, AR061: 2 | | |
| | | | | | | Pro-75 to Lys-83. | H0583: 1, S0360: 1, | | |
| | | | | | | | H0318: 1, H0428: 1, | | |
| | | | | | | | H0598: 1, L0803: 1 and | | |
| | | | | | | | L0757: 1. | | |
| | | 969584 | 138 | 592-792 | 266 | Gln-34 to Lys-60. | | | |
| 59 | HELFT59 | 745571 | 69 | 31-306 | 197 | Ser-57 to Asn-62. | AR089: 1, AR061: 1 | 1p22 | 170995, |
| | | | | | | | S0045: 1 and H0581: 1. | | 191540, |
| | | | | | | | | | 274270, |
| | | | | | | | | | 274270, |
| | | | | | | | | | 600309, |
| | | | | | | | | | 601414, |
| | | | | | | | | | 602094 |
| 60 | HTLBG23 | 908391 | 70 | 2-535 | 198 | Phe-14 to Gly-19. | AR061: 4, AR089: 2 | 22q13.2- | 188826, |
| | | | | | | | | q13.31 | 250100, |
| | | | | | | | | | 250800, |
| | | | | | | | | | 250800 |
| 61 | HKGCC54 | 968183 | 71 | 2-586 | 199 | Ser-1 to Asp-15, | AR089: 1, AR061: 0 | | |
| | | | | | | Lys-24 to Gln-37, | S0418: 2, H0494: 2, | | |
| | | | | | | Phe-48 to Gly-62, | H0529: 2, L0800: 2, | | |
| | | | | | | Ile-65 to Leu-74, | H0547: 2, H0660: 2, | | |
| | | | | | | Arg-94 to Lys-106. | L0777: 2, L0591: 2, | | |
| | | | | | | | L0362: 2, H0543: 2, | | |
| | | | | | | | H0657: 1, S0420: 1, | | |
| | | | | | | | S0468: 1, H0574: 1, | | |
| | | | | | | | H0014: 1, H0038: 1, | | |
| | | | | | | | H0647: 1, H0538: 1, | | |
| | | | | | | | L0762: 1, L0771: 1, | | |
| | | | | | | | L0773: 1, L0662: 1, | | |
| | | | | | | | L0766: 1, L0655: 1, | | |
| | | | | | | | L0783: 1, H0648: 1, | | |
| | | | | | | | H0134: 1, H0478: 1, | | |
| | | | | | | | S0031: 1 and H0423: 1. | | |
| 62 | HBXDN39 | 508449 | 72 | 64-510 | 200 | Met-36 to Lys-41, | AR061: 3, AR089: 3 | 6p21.3 | 106300, |
| | | | | | | Gln-71 to Leu-81, | L0439: 5, H0046: 4, | | 108800, |
| | | | | | | Leu-93 to Thr-108. | L0665: 4, L0794: 3, | | 120290, |
| | | | | | | | L0777: 3, H0662: 2, | | 120290, |
| | | | | | | | H0032: 2, L0758: 2, | | 120810, |
| | | | | | | | H0624: 1, S0358: 1, | | 120820, |
| | | | | | | | H0497: 1, H0013: 1, | | 142857, |
| | | | | | | | H0581: 1, S0038: 1, | | 142858, |
| | | | | | | | H0130: 1, L0639: 1, | | 150270, |
| | | | | | | | L0776: 1, L0438: 1, | | 167250, |
| | | | | | | | L0747: 1, L0779: 1, | | 170261, |
| | | | | | | | L0759: 1, S0011: 1 and | | 177900, |
| | | | | | | | S0242: 1. | | 179450, |
| | | | | | | | | | 201910, |
| | | | | | | | | | 217000, |
| | | | | | | | | | 222100, |
| | | | | | | | | | 233100, |
| | | | | | | | | | 235200, |
| | | | | | | | | | 248611, |
| | | | | | | | | | 256550, |
| | | | | | | | | | 256550, |
| | | | | | | | | | 600202, |
| | | | | | | | | | 600261, |
| | | | | | | | | | 601868, |
| | | | | | | | | | 602280, |
| | | | | | | | | | 602475 |
| 63 | HUSFH37 | 523045 | 73 | 40-627 | 201 | Pro-15 to Pro-22. | AR089: 2, AR061: 1 | | |
| | | | | | | | S0192: 4, H0052: 3, | | |
| | | | | | | | L0754: 3, L0755: 3, | | |
| | | | | | | | H0393: 2, H0550: 2, | | |
| | | | | | | | H0587: 2, H0050: 2, | | |
| | | | | | | | L0455: 2, L0761: 2, | | |
| | | | | | | | L0809: 2, H0519: 2, | | |
| | | | | | | | H0556: 1, 80001: 1, | | |
| | | | | | | | S0356: 1, 80358: 1, | | |
| | | | | | | | S0360: 1, H0580: 1, | | |
| | | | | | | | S0222: 1, H0392: 1, | | |
| | | | | | | | H0486: 1, H0069: 1, | | |
| | | | | | | | H0599: 1, 80010: 1, | | |
| | | | | | | | 80051: 1, H0594: 1, | | |
| | | | | | | | H0687: 1, H0644: 1, | | |
| | | | | | | | H0264: 1, H0488: 1, | | |
| | | | | | | | H0433: 1, T0041: 1, | | |
| | | | | | | | S0372: 1, L0763: 1, | | |
| | | | | | | | L0648: 1, L0794: 1, | | |
| | | | | | | | L0803: 1, L0774: 1, | | |
| | | | | | | | L0666: 1, 80053: 1, | | |
| | | | | | | | H0593: 1, H0672: 1, | | |
| | | | | | | | L0751: 1, L0745: 1, | | |
| | | | | | | | L0747: 1, L0777: 1, | | |
| | | | | | | | L0780: 1, H0445: 1, | | |
| | | | | | | | L0591: 1, L0581: 1 and | | |
| | | | | | | | H0543: 1. | | |
| 64 | HOUFR33 | 572611 | 74 | 358-35 | 202 | | AR061: 7, AR089: 3 | 14 | |
| | | | | | | | S0040: 1, 140634: 1 and | | |
| | | | | | | | H0063: 1. | | |
| 65 | HFKFM24 | 677398 | 75 | 114-554 | 203 | Arg-1 to Gln-6, | AR089: 1, AR061: 0 | | |
| | | | | | | Pro-75 to Asp-82. | S0001: 1, H0549: 1, | | |
| | | | | | | | H0012: 1 and H0620: 1. | | |
| 66 | HDPTG17 | 693874 | 76 | 235-666 | 204 | | AR089: 6, AR061: 2 | | |
| | | | | | | | S0040: 1, H0393: 1, | | |
| | | | | | | | H0357: 1, H0013: 1, | | |
| | | | | | | | L0766: 1, L0803: 1, | | |
| | | | | | | | S0152: 1, H0521: 1, | | |
| | | | | | | | H0444: 1 and H0543: 1. | | |
| 67 | HFITZ54 | 729592 | 77 | 12-455 | 205 | Arg-17 to Trp-26, | AR061: 0, AR089: 0 | | |
| | | | | | | Pro-36 to Trp-43. | L0761: 4, L0766: 3, | | |
| | | | | | | | L0744: 3, S0152: 2, | | |
| | | | | | | | L0754: 2, L0747: 2, | | |
| | | | | | | | L0752: 2, H0255: 1, | | |
| | | | | | | | H0580: 1, L0717: 1, | | |
| | | | | | | | H0052: 1, H0012: 1, | | |
| | | | | | | | H0620: 1, H0424: 1, | | |
| | | | | | | | H0063: 1, L0772: 1, | | |
| | | | | | | | L0646: 1, L0803: 1, | | |
| | | | | | | | L0774: 1, L0775: 1, | | |
| | | | | | | | L0784: 1, L0806: 1, | | |
| | | | | | | | L0659: 1, L0782: 1, | | |
| | | | | | | | L0663: 1, L0665: 1, | | |
| | | | | | | | L0743: 1, L0750: 1, | | |
| | | | | | | | L0756: 1, L0779: 1, | | |
| | | | | | | | L0759: 1 and S0196: 1. | | |
| 68 | HNTCQ86 | 784814 | 78 | 1-630 | 206 | Met-12 to Cys-33, | AR061: 1, AR089: 0 | | |
| | | | | | | Arg-48 to Phe-53, | H0486: 1 and H0519: | | |
| | | | | | | Ala-85 to Glu-96. | 1. | | |
| 69 | HNTCJ76 | 908945 | 79 | 560-1066 | 207 | Glu-29 to Asp-35, | AR061: 1, AR089: 0 | | |
| | | | | | | Gln-40 to Tyr-64, | H0341: 2, S0040: 1, | | |
| | | | | | | Pro-87 to Gln-94, | H0580: 1, H0327: 1, | | |
| | | | | | | Tyr-119 to Gly-124. | H0623: 1, H0561: 1, | | |
| | | | | | | | H0519: 1, H0521: 1, | | |
| | | | | | | | S0390: 1, L0740: 1, | | |
| | | | | | | | L0749: 1, L0758: 1, | | |
| | | | | | | | L0581: 1 and L0601: 1. | | |
| 70 | HDPOH15 | 909193 | 80 | 309-1 | 208 | | AR089: 5, AR061: 2 | | |
| | | | | | | | S0136: 5, L0809: 3, | | |
| | | | | | | | L0649: 2, L0663: 2, | | |
| | | | | | | | L0599: 2, H0341: 1, | | |
| | | | | | | | T0039: 1, T0110: 1, | | |
| | | | | | | | N0006: 1, L0662: 1, | | |
| | | | | | | | L0768: 1, L0659: 1, | | |
| | | | | | | | L0783: 1, L0666: 1, | | |
| | | | | | | | L0664: 1, L0665: 1, | | |
| | | | | | | | L0438: 1, H0547: 1, | | |
| | | | | | | | H0659: 1, H0522: 1, | | |
| | | | | | | | L0748: 1, L0439: 1, | | |
| | | | | | | | L0731: 1 and L0758: 1. | | |
| 71 | HFPBV40 | 909194 | 81 | 1-444 | 209 | Leu-17 to Arg-22, | AR061: 338, AR089: | | |
| | | | | | | Asp-78 to Cys-90, | 136 | | |
| | | | | | | Leu-93 to Ala-112. | H0013:2, S0222: 1, | | |
| | | | | | | | H0069: 1, H0561: 1, | | |
| | | | | | | | L0769: 1, L0748: 1 and | | |
| | | | | | | | L0745: 1. | | |
| 72 | HWMEG01 | 915157 | 82 | 3-650 | 210 | Thr-1 to Leu-7, | AR089: 24, AR061: 13 | Xq13.1 | 304040, |
| | | | | | | Ala-26 to Val-31, | L0766: 14, L0769: 12, | | 305100, |
| | | | | | | Ser-66 to Val-73, | L0774: 10, L0770: 8, | | 305450, |
| | | | | | | Ala-80 to Pro-90, | L0759: 8, L0740: 7, | | 309605, |
| | | | | | | Glu-127 to Ala-135, | H0484: 5, H0617: 5, | | 312760, |
| | | | | | | Glu-142 to Glu-161, | L0803: 5, L0751: 5, | | 314250, |
| | | | | | | Leu-166 to Trp-173, | L0747: 5, L0731: 5, | | 314580 |
| | | | | | | Pro-176 to Gln-183, | H0483: 4, S0358: 4, | | |
| Arg-204 to Asp-211. | H0670: 4, L0780: 4, | | | | | | | | |
| | | | | | | | H0445: 4, H0341: 3, | | |
| | | | | | | | H0618: 3, H0251: 3, | | |
| | | | | | | | H0546: 3, H0087: 3, | | |
| | | | | | | | L0761: 3, L0800: 3, | | |
| | | | | | | | L0794: 3, L0789: 3, | | |
| | | | | | | | H0672: 3, L0743: 3, | | |
| | | | | | | | L0750: 3, L0757: 3, | | |
| | | | | | | | H0545: 2, H0012: 2, | | |
| | | | | | | | H0620: 2, H0024: 2, | | |
| | | | | | | | H0428: 2, H0649: 2, | | |
| | | | | | | | L0772: 2, L0768: 2, | | |
| | | | | | | | L0809: 2,.L0788: 2, | | |
| | | | | | | | H0699: 2, H0539: 2, | | |
| | | | | | | | S0380: 2, L0748: 2, | | |
| | | | | | | | L0756: 2, L0777: 2, | | |
| | | | | | | | L0755: 2, H0444: 2, | | |
| | | | | | | | H0650: 1, H0656: 1, | | |
| | | | | | | | S0298: 1, S0212: 1, | | |
| | | | | | | | H0661: 1, H0306: 1, | | |
| | | | | | | | S0420: 1, S0442: 1, | | |
| | | | | | | | S0354: 1, S0360: 1, | | |
| | | | | | | | S0045: 1, S0046: 1, | | |
| | | | | | | | S0278: 1, H0592: 1, | | |
| | | | | | | | H0257: 1, H0190: 1, | | |
| | | | | | | | H0250: 1, H0069: 1, | | |
| | | | | | | | H0427: 1, S0280: 1, | | |
| | | | | | | | H0156: 1, H0599: 1, | | |
| | | | | | | | H0253: 1, H0581: 1, | | |
| | | | | | | | H0309: 1, H0544: 1, | | |
| | | | | | | | H0041: 1, H0373: 1, | | |
| | | | | | | | H0051: 1, H0510: 1, | | |
| | | | | | | | H0416: 1, H0292: 1, | | |
| | | | | | | | H0252: 1, H0615: 1, | | |
| | | | | | | | H0606: 1, H0708: 1, | | |
| | | | | | | | H0264: 1, S0144: 1, | | |
| | | | | | | | L0763: 1, L0638: 1, | | |
| | | | | | | | L0773: 1, L0648: 1, | | |
| | | | | | | | L0649: 1, L0804: 1, | | |
| | | | | | | | L0775: 1, L0375: 1, | | |
| | | | | | | | L0806: 1, L0653: 1, | | |
| | | | | | | | L0783: 1, L0384: 1, | | |
| | | | | | | | L0787: 1, L0665: 1, | | |
| | | | | | | | H0144: 1, H0520: 1, | | |
| | | | | | | | S0126: 1, H0689: 1, | | |
| | | | | | | | H0684: 1, H0658: 1, | | |
| | | | | | | | H0660: 1, H0696: 1, | | |
| | | | | | | | H0134: 1, H0631: 1, | | |
| | | | | | | | S0028: 1, S0032: 1, | | |
| | | | | | | | L0439: 1, L0754: 1, | | |
| | | | | | | | L0749: 1, L0779: 1, | | |
| | | | | | | | L0758: 1, S0031: 1, | | |
| | | | | | | | L0361: 1, H0542: 1, | | |
| | | | | | | | H0423: 1 and H0008: 1. | | |
| 73 | HE8T032 | 918867 | 83 | 1-408 | 211 | Pro-46 to Val-54, | AR061: 5, AR089: 3 | | |
| | | | | | | Pro-81 to Glu-91, | L0438: H, L0439: H, | | |
| | | | | | | Pro-97 to Asn-111, | L0747: 7, L0749: 7, | | |
| | | | | | | Pro-127 to Trp-133. | L0777: 7, L0809: 5, | | |
| | | | | | | | S0358: 4, L0803: 4, | | |
| | | | | | | | L0591: 4, S0360: 3, | | |
| | | | | | | | L0717: 3, H0013: 3,: | | |
| | | | | | | | L0805: 3, L0779: 3, | | |
| | | | | | | | L0755: 3, H0615: 2, | | |
| | | | | | | | H0039: 2, H0509: 2, | | |
| | | | | | | | H0538: 2, L0654: 2, | | |
| | | | | | | | L0666: 2, L0751: 2, | | |
| | | | | | | | L0754: 2, H0444: 2, | | |
| | | | | | | | H0445: 2, H0624: 1, | | |
| | | | | | | | H0171: 1, S6024: 1, | | |
| | | | | | | | S0114: 1, L0002: 1, | | |
| | | | | | | | S0116: 1, H0208: 1, | | |
| | | | | | | | H0619: 1, H0351: 1, | | |
| | | | | | | | H0549: 1, H0370: 1, | | |
| | | | | | | | H0333: 1, H0574: 1, | | |
| | | | | | | | H0427: 1, S0280: 1, | | |
| | | | | | | | H0421: 1, H0052: 1, | | |
| | | | | | | | H0309: 1, H0263: 1, | | |
| | | | | | | | L0163: 1, S6028: 1, | | |
| | | | | | | | H0622: 1, S0036: 1, | | |
| | | | | | | | H0412: 1, L0598: 1, | | |
| | | | | | | | L0769: 1, L0637: 1, | | |
| | | | | | | | L0773: 1, L0766: 1, | | |
| | | | | | | | L0775: 1, L0776: 1, | | |
| | | | | | | | L0657: 1, L0782: 1, | | |
| | | | | | | | L0783: 1, L0787: 1, | | |
| | | | | | | | L0789: 1, L0665: 1, | | |
| | | | | | | | H0144: 1, H0547: 1, | | |
| | | | | | | | S0126: 1, S0378: 1, | | |
| | | | | | | | S0380: 1, L0748: 1, | | |
| | | | | | | | L0756: 1, L0753: 1, | | |
| | | | | | | | L0759: 1, S0031: 1, | | |
| | | | | | | | S0260: 1, H0595: 1, | | |
| | | | | | | | L0605: 1, S0194: 1 and | | |
| | | | | | | | S0424: 1. | | |
| 74 | HHEZD80 | 921160 | 84 | 303-692 | 212 | | AR089: 8, AR061: 6 | | |
| | | | | | | | L0766: 2, S0134: 1, | | |
| | | | | | | | S0116: 1, H0341: 1, | | |
| | | | | | | | H0013: 1, H0244: 1, | | |
| | | | | | | | S0346: 1, H0521: 1, | | |
| | | | | | | | H0522: 1, L0592: 1 and | | |
| | | | | | | | H0543: 1. | | |
| 75 | HULCB61 | 923149 | 85 | 190-660 | 213 | Pro-27 to Val-37, | AR089: 11, AR061: 6 | | |
| | | | | | | Glu-55 to Pro-64, | H0341: 1, T0112: 1, | | |
| | | | | | | Ser-66 to Gln-81, | H0530: 1, L0794: 1, | | |
| | | | | | | Pro-97 to Gln-104, | H0520: 1, S0126: 1 and | | |
| | | | | | | Glu-119 to Glu-126. | L0485: 1. | | |
| 76 | HDMBB39 | 930905 | 86 | 146-976 | 214 | | AR089: 2, AR061: 1 | | |
| | | | | | | | L0777: 5, L0758: 5, | | |
| | | | | | | | L0751: 4, L0754: 4, | | |
| | | | | | | | L0756: 4, H0556: 3, | | |
| | | | | | | | H0638: 3, L0659: 3, | | |
| | | | | | | | L0438: 3, L0749: 3, | | |
| | | | | | | | L0752: 3, S0222: 2, | | |
| | | | | | | | H0457: 2, L0769: 2, | | |
| | | | | | | | L0648: 2, L0662: 2, | | |
| | | | | | | | L0748: 2, L0439: 2, | | |
| | | | | | | | L0779: 2, L0731: 2, | | |
| | | | | | | | L0596: 2, H0422: 2, | | |
| | | | | | | | H0506: 2, H0624: 1, | | |
| | | | | | | | H0583: 1, S0001: 1, | | |
| | | | | | | | H0449: 1, S0418: 1, | | |
| | | | | | | | S0376: 1, H0619: 1, | | |
| | | | | | | | H0437: 1, H0331: 1, | | |
| | | | | | | | H0486: 1, H0599: 1, | | |
| | | | | | | | H0590: 1, T0048: 1, | | |
| | | | | | | | H0318: 1, H0581: 1, | | |
| | | | | | | | H0052: 1, H0150: 1, | | |
| | | | | | | | H0057: 1, H0014: 1, | | |
| | | | | | | | S0362: 1, H0051: 1, | | |
| | | | | | | | H0179: 1, L0483: 1, | | |
| | | | | | | | L0455: 1, H0529: 1, | | |
| | | | | | | | L0763: 1, L0764: 1, | | |
| | | | | | | | L0768: 1, L0364: 1, | | |
| | | | | | | | L0794: 1, L0766: 1, | | |
| | | | | | | | L0649: 1, L0389: 1, | | |
| | | | | | | | L0775: 1, L0655: 1, | | |
| | | | | | | | L0647: 1, L0787: 1, | | |
| | | | | | | | L0666: 1, H0701: 1, | | |
| | | | | | | | H0520: 1, H0547: 1, | | |
| | | | | | | | H0519: 1, H0683: 1, | | |
| | | | | | | | H0435: 1, H0648: 1, | | |
| | | | | | | | S0378: 1, H0518: 1, | | |
| | | | | | | | S0044: 1, H0555: 1, | | |
| | | | | | | | H0436: 1, H0478: 1, | | |
| | | | | | | | L0747: 1, L0750: 1, | | |
| | | | | | | | L0755: 1, S0260: 1 and | | |
| | | | | | | | H0423: 1. | | |
| 77 | HKADW47 | 943680 | 87 | 756-145 | 215 | | AR089: 1, AR061: 1 | | |
| | | | | | | | L0794: 10, L0803: 4, | | |
| | | | | | | | S0360: 3, S0045: 3, | | |
| | | | | | | | H0486: 3, H0013: 3, | | |
| | | | | | | | H0251: 3, L0766: 3, | | |
| | | | | | | | H0265: 2, S0222: 2, | | |
| | | | | | | | H0090: 2, H0591: 2, | | |
| | | | | | | | L0809: 2, H0519: 2, | | |
| | | | | | | | L0439: 2, L0750: 2, | | |
| | | | | | | | L0758: 2, H0170: 1, | | |
| | | | | | | | H0556: 1, S0040: 1, | | |
| | | | | | | | S0114: 1, L0760: 1, | | |
| | | | | | | | H0255: 1, H0432: 1, | | |
| | | | | | | | H0587: 1, H0632: 1, | | |
| | | | | | | | H0492: 1, H0178: 1, | | |
| | | | | | | | H0050: 1, H0620: 1, | | |
| | | | | | | | H0688: 1, H0553: 1, | | |
| | | | | | | | H0494: 1, H0561: 1, | | |
| | | | | | | | H0641: 1, L0638: 1, | | |
| | | | | | | | L0761: 1, L0774: 1, | | |
| | | | | | | | L0653: 1, L0655: 1, | | |
| | | | | | | | L0663. 1, H0144: 1, | | |
| | | | | | | | L0438: 1, H0689: 1, | | |
| | | | | | | | H0659: 1, H0521: 1, | | |
| | | | | | | | S0146: 1, H0436: 1, | | |
| | | | | | | | L0748: 1, L0754: 1, | | |
| | | | | | | | L0752: 1, L0591: 1, | | |
| | | | | | | | L0595: 1 and L0366: 1. | | |
| 78 | HUCOF56 | 951657 | 88 | 93-494 | 216 | Glu-17 to Lys-30, | AR089: 1, AR061: 0 | | |
| | | | | | | Met-32 to Leu-38, | S0328: 5, S0400: 1, | | |
| | | | | | | Ile-92 to Thr-112. | S0420: 1, H0549: 1, | | |
| | | | | | | | H0574: 1, H0559: 1, | | |
| | | | | | | | H0486: 1, H0014: 1, | | |
| | | | | | | | H0188: 1, H0031: 1, | | |
| | | | | | | | S0364: 1, H0598: 1, | | |
| | | | | | | | H0087: 1, H0494: 1, | | |
| | | | | | | | L0520: 1, L0772: 1, | | |
| | | | | | | | L0764: 1, L0768: 1, | | |
| | | | | | | | L0498: 1, L0509: 1, | | |
| | | | | | | | L0655: 1, L0517: 1, | | |
| | | | | | | | L0783: 1, L0809: 1, | | |
| | | | | | | | L0519: 1, L0666: 1, | | |
| | | | | | | | H0691: 1, H0672: 1, | | |
| | | | | | | | L0750: 1, L0752: 1 and | | |
| | | | | | | | L0758: 1. | | |
| 79 | HHATZ53 | 966374 | 89 | 3-794 | 217 | Ala-1 to Ser-8, | AR089: 15, AR061: 6 | | |
| | | | | | | Ser-30 to Asp-37, | S0418: 3, S0152: 2, | | |
| | | | | | | Arg-42 to Leu-49, | H0136: 2 and L0766: 1. | | |
| | | | | | | Ser-52 to Pro-60, | | | |
| | | | | | | Arg-70 to Lys-77, | | | |
| | | | | | | Gln-84 to Leu-90. | | | |
| 80 | HCGLD61 | 974217 | 90 | 147-830 | 218 | Ser-2 to Gly-7, | AR089: 7, AR061: 3 | | |
| | | | | | | Arg-15 to Ala-20, | L0740: 5, L0747: 5, | | |
| | | | | | | Ala-64 to Glu-71, | L0731: 5, L0763: 4, | | |
| | | | | | | Asp-76 to Pro-85, | L0657: 4, L0749: 4, | | |
| | | | | | | Val-90 to Thr-99, | H0318: 3, H0251: 3, | | |
| | | | | | | Ile-115 to Phe-128, | H0494: 3, H0529: 3, | | |
| | | | | | | Gly-154 to Pro-161, | H0170: 2, H0657: 2, | | |
| | | | | | | Lys-167 to Gln-173, | H0656: 2, H0450: 2, | | |
| | | | | | | Ser-183 to Glu-197, | S0354: 2, S0358: 2, | | |
| | | | | | | Gly-209 to Glu-223. | H0586: 2, H0331: 2, | | |
| | | | | | | | H0156: 2, H0266: 2, | | |
| | | | | | | | S0366: 2, H0038: 2, | | |
| | | | | | | | H0641: 2, L0662: 2, | | |
| | | | | | | | L0775: 2, L0809: 2, | | |
| | | | | | | | L0529: 2, H0519: 2, | | |
| | | | | | | | H0660: 2, H0521: 2, | | |
| | | | | | | | L0779: 2, L0757: 2, | | |
| | | | | | | | H0422: 2, H0624: 1, | | |
| | | | | | | | H0171: 1, S0430: 1, | | |
| | | | | | | | H0484: 1, H0671: 1, | | |
| | | | | | | | H0305: 1, H0458: 1, | | |
| | | | | | | | S0420: 1, S0360: 1, | | |
| | | | | | | | S0046: 1, H0619: 1, | | |
| | | | | | | | H0351: 1, S0222: 1, | | |
| | | | | | | | H0486: 1, T0112: 1, | | |
| | | | | | | | H0013: 1, H0427: 1, | | |
| | | | | | | | S0474: 1, H0052: 1, | | |
| | | | | | | | H0327: 1, H0046: 1, | | |
| | | | | | | | H0123: 1, H0024: 1, | | |
| | | | | | | | H0373: 1, H0271: 1, | | |
| | | | | | | | S0003: 1, S0214: 1, | | |
| | | | | | | | H0615: 1, H0039: 1, | | |
| | | | | | | | T0006: 1, H0124: 1, | | |
| | | | | | | | H0090: 1, H0616: 1, | | |
| | | | | | | | H0551: 1, H0264: 1, | | |
| | | | | | | | H0022: 1, T0041: 1, | | |
| | | | | | | | H0560: 1, L0762: 1, | | |
| | | | | | | | L0796: 1, L0761: 1, | | |
| | | | | | | | L0800: 1, L0767: 1, | | |
| | | | | | | | L0768: 1, L0387: 1, | | |
| | | | | | | | L0804: 1, L0651: 1, | | |
| | | | | | | | L0655: 1, L0659: 1, | | |
| | | | | | | | H0547: 1, H0658: 1, | | |
| | | | | | | | S0152: 1, H0696: 1, | | |
| | | | | | | | H0436: 1, S0027: 1, | | |
| | | | | | | | S0032: 1, L0748: 1, | | |
| | | | | | | | L0754: 1, L0686: 1, | | |
| | | | | | | | S0434: 1, S0276: 1 and | | |
| | | | | | | | H0543: 1. | | |

[0050] The first column in Table 1A provides the gene number in the application corresponding to the clone identifier. The second column in Table 1A provides a unique “Clone ID NO:Z” for a cDNA clone related to each contig sequence disclosed in Table 1A. This clone ID references the cDNA clone which contains at least the 5′ most sequence of the assembled contig and at least a portion of SEQ ID NO:X was determined by directly sequencing the referenced clone. The reference clone may have more sequence than described in the sequence listing or the clone may have less. In the vast majority of cases, however, the clone is believed to encode a full-length polypeptide. In the case where a clone is not full-length, a full-length cDNA can be obtained by methods described elsewhere herein.

[0051] The third column in Table 1A provides a unique “Contig ID” identification for each contig sequence. The fourth column provides the “SEQ ID NO:” identifier for each of the contig polynucleotide sequences disclosed in Table 1A. The fifth column, “ORF (From-To)”, provides the location (i.e., nucleotide position numbers) within the polynucleotide sequence “SEQ ID NO:X” that delineate the preferred open reading frame (ORF) shown in the sequence listing and referenced in Table 1A, column 6, as SEQ ID NO:Y. Where the nucleotide position number “To” is lower than the nucleotide position number “From”, the preferred ORF is the reverse complement of the referenced polynucleotide sequence.

[0052] The sixth column in Table 1A provides the corresponding SEQ ID NO:Y for the polypeptide sequence encoded by the preferred ORF delineated in column 5. In one embodiment, the invention provides an amino acid sequence comprising, or alternatively consisting of, a polypeptide encoded by the portion of SEQ ID NO:X delineated by “ORF (From-To)”. Also provided are polynucleotides encoding such amino acid sequences and the complementary strand thereto.

[0053] Column 7 in Table 1A lists residues comprising epitopes contained in the polypeptides encoded by the preferred ORF (SEQ ID NO:Y), as predicted using the algorithm of Jameson and Wolf, (1988) Comp. Appl. Biosci. 4:181-186. The Jameson-Wolf antigenic analysis was performed using the computer program PROTEAN (Version 3.11 for the Power MacIntosh, DNASTAR, Inc., 1228 South Park Street Madison, Wis.). In specific embodiments, polypeptides of the invention comprise, or alternatively consist of, at least one, two, three, four, five or more of the predicted epitopes as described in Table 1A. It will be appreciated that depending on the analytical criteria used to predict antigenic determinants, the exact address of the determinant may vary slightly.

[0054] Column 8 in Table 1A provides an expression profile and library code: count for each of the contig sequences (SEQ ID NO:X) disclosed in Table 1A, which can routinely be combined with the information provided in Table 4 and used to determine the tissues, cells, and/or cell line libraries which predominantly express the polynucleotides of the invention. The first number in column 8 (preceding the colon), represents the tissue/cell source identifier code corresponding to the code and description provided in Table 4. For those identifier codes in which the first two letters are not “AR”, the second number in column 8 (following the colon) represents the number of times a sequence corresponding to the reference polynucleotide sequence was identified in the tissue/cell source. Those tissue/cell source identifier codes in which the first two letters are “AR” designate information generated using DNA array technology. Utilizing this technology, cDNAs were amplified by PCR and then transferred, in duplicate, onto the array. Gene expression was assayed through hybridization of first strand cDNA probes to the DNA array. cDNA probes were generated from total RNA extracted from a variety of different tissues and cell lines. Probe synthesis was performed in the presence of ³³P dCTP, using oligo(dT) to prime reverse transcription. After hybridization, high stringency washing conditions were employed to remove non-specific hybrids from the array. The remaining signal, emanating from each gene target, was measured using a Phosphorimager. Gene expression was reported as Phosphor Stimulating Luminescence (PSL) which reflects the level of phosphor signal generated from the probe hybridized to each of the gene targets represented on the array. A local background signal subtraction was performed before the total signal generated from each array was used to normalize gene expression between the different hybridizations. The value presented after “[array code]:” represents the mean of the duplicate values, following background subtraction and probe normalization. One of skill in the art could routinely use this information to identify normal and/or diseased tissue(s) which show a predominant expression pattern of the corresponding polynucleotide of the invention or to identify polynucleotides which show predominant and/or specific tissue and/or cell expression.

[0055] Column 9 in Table 1A provides a chromosomal map location for certain polynucleotides of the invention. Chromosomal location was determined by finding exact matches to EST and cDNA sequences contained in the NCBI (National Center for Biotechnology Information) UniGene database. Each sequence in the UniGene database is assigned to a “cluster”; all of the ESTs, cDNAs, and STSs in a cluster are believed to be derived from a single gene. Chromosomal mapping data is often available for one or more sequence(s) in a UniGene cluster; this data (if consistent) is then applied to the cluster as a whole. Thus, it is possible to infer the chromosomal location of a new polynucleotide sequence by determining its identity with a mapped UniGene cluster.

[0056] A modified version of the computer program BLASTN (Altshul et al., J. Mol. Biol. 215:403-410 (1990); and Gish and States, Nat. Genet. 3:266-272 (1993)) was used to search the UniGene database for EST or cDNA sequences that contain exact or near-exact matches to a polynucleotide sequence of the invention (the ‘Query’). A sequence from the UniGene database (the ‘Subject’) was said to be an exact match if it contained a segment of 50 nucleotides in length such that 48 of those nucleotides were in the same order as found in the Query sequence. If all of the matches that met this criteria were in the same UniGene cluster, and mapping data was available for this cluster, it is indicated in Table 1A under the heading “Cytologic Band”. Where a cluster had been further localized to a distinct cytologic band, that band is disclosed; where no banding information was available, but the gene had been localized to a single chromosome, the chromosome is disclosed.

[0057] Once a presumptive chromosomal location was determined for a polynucleotide of the invention, an associated disease locus was identified by comparison with a database of diseases which have been experimentally associated with genetic loci. The database used was the Morbid Map, derived from OMIM™ (supra). If the putative chromosomal location of a polynucleotide of the invention (Query sequence) was associated with a disease in the Morbid Map database, an OMIM reference identification number was noted in column 10, Table 1A, labelled “OMIM Disease Reference(s)”. Table 5 is a key to the OMIM reference identification numbers (column 1), and provides a description of the associated disease in Column 2.

TABLE 1B

| | SEQ | | | SEQ | |
|---|---|---|---|---|---|
| | ID | | | ID | |
| Clone ID | NO: | CONTIG | | NO: | EXON |
| NO:Z | X | ID: | BAC ID: A | B | From-To |
| HBAGY72 | 19 | 859099 | AC023881 | 267 | 1-80 |
| HBAGY72 | 19 | 859099 | AC011953 | 268 | 1-126 |
| HBAGY72 | 19 | 859099 | AC027300 | 269 | 1-158 |
| HBAGY72 | 19 | 859099 | AC023881 | 270 | 1-77 |
| HCRMZ59 | 24 | 922431 | AL359092 | 271 | 1-116 |
| HCRMZ59 | 24 | 922431 | AC009453 | 272 | 1-143 |
| HCRMZ59 | 24 | 922431 | AC025036 | 273 | 1-148 |
| HCRMZ59 | 24 | 922431 | AC011953 | 274 | 1-126 |
| HCRMZ59 | 24 | 922431 | AC027300 | 275 | 1-158 |
| HCRMZ59 | 24 | 922431 | AC022231 | 276 | 1-151 |
| HCRMZ59 | 24 | 922431 | AP001451 | 277 | 1-96 |
| HCRMZ59 | 24 | 922431 | AC022232 | 278 | 1-152 |
| HCRMZ59 | 24 | 922431 | AC010694 | 279 | 1-202 |
| HCRMZ59 | 24 | 922431 | AC048342 | 280 | 1-130 |
| HCRMZ59 | 24 | 922431 | AC010694 | 281 | 1-77 |
| HCRMZ59 | 24 | 922431 | AC048342 | 282 | 1-118 |
| HHBEG80 | 34 | 951688 | AL355885 | 283 | 1-75 |
| | | | | | 188-497 |
| | | | | | 613-693 |
| | | | | | 766-3364 |
| HHBEG80 | 34 | 951688 | AL355885 | 284 | 1-455 |
| HHBEM70 | 35 | 756949 | AC025036 | 285 | 1-148 |
| HHBEM70 | 35 | 756949 | AC011953 | 286 | 1-126 |
| HHBEM70 | 35 | 756949 | AC027300 | 287 | 1-158 |
| HLYCF37 | 41 | 949401 | AC058800 | 288 | 1-1193 |
| HLYCF37 | 41 | 949401 | AL159172 | 289 | 1-1268 |
| HLYCF37 | 41 | 949401 | AC058800 | 290 | 1-303 |
| HLYCF37 | 41 | 949401 | AL159172 | 291 | 1-303 |
| HLYCF37 | 41 | 949401 | AL159172 | 292 | 1-603 |
| HWLQZ02 | 63 | 918869 | AC012119 | 293 | 1-117 |
| HWLQZ02 | 63 | 918869 | AL359092 | 294 | 1-116 |
| HWLQZ02 | 63 | 918869 | AC009453 | 295 | 1-143 |
| HWLQZ02 | 63 | 918869 | AC025036 | 296 | 1-148 |
| HWLQZ02 | 63 | 918869 | AC011953 | 297 | 1-126 |
| HWLQZ02 | 63 | 918869 | AC016327 | 298 | 1-125 |
| HWLQZ02 | 63 | 918869 | AC022231 | 299 | 1-151 |
| HWLQZ02 | 63 | 918869 | AC023242 | 300 | 1-86 |
| HTLBG23 | 70 | 908391 | AL023553 | 301 | 1-108 |
| | | | | | 853-2997 |
| HTLBG23 | 70 | 908391 | AL023553 | 302 | 1-107 |
| HTLBG23 | 70 | 908391 | AL023553 | 303 | 1-583 |
| | | | | | 949-1067 |
| | | | | | 1947-2025 |
| | | | | | 2201-2550 |
| | | | | | 4158-4259 |
| | | | | | 4866-4985 |
| | | | | | 5802-6350 |
| | | | | | 7101-7284 |
| | | | | | 7391-7517 |
| | | | | | 7669-7750 |
| | | | | | 9218-9527 |
| | | | | | 10128-10444 |
| | | | | | 12863-13058 |
| HBXDN39 | 72 | 508449 | AC022657 | 304 | 1-767 |
| | | | | | 785-1553 |
| | | | | | 1748-2241 |
| | | | | | 2402-2694 |
| | | | | | 3354-3931 |
| HBXDN39 | 72 | 508449 | AC022657 | 305 | 1-578 |
| HUSFH37 | 73 | 523045 | AC004611 | 306 | 1-251 |
| | | | | | 1382-1472 |
| | | | | | 5771-6133 |
| | | | | | 6295-6359 |
| | | | | | 6442-6650 |
| | | | | | 7826-8347 |
| | | | | | 9254-9316 |
| | | | | | 10212-12376 |
| | | | | | 12559-12787 |
| | | | | | 15502-15783 |
| | | | | | 16110-16487 |
| | | | | | 17335-17665 |
| | | | | | 17840-17998 |
| | | | | | 18083-18197 |
| | | | | | 19251-19627 |
| | | | | | 20272-20583 |
| | | | | | 20698-20973 |
| | | | | | 22520-22651 |
| | | | | | 23894-23987 |
| | | | | | 24090-24439 |
| | | | | | 25193-27420 |
| | | | | | 27632-28282 |
| | | | | | 28565-29505 |
| | | | | | 29889-30034 |
| | | | | | 30439-31506 |
| | | | | | 32363-32503 |
| | | | | | 33275-33618 |
| | | | | | 33760-33872 |
| | | | | | 33926-34344 |
| | | | | | 34798-34914 |
| | | | | | 35011-35078 |
| | | | | | 35152-35799 |
| HUSFH37 | 73 | 523045 | AC004611 | 307 | 1-104 |
| HUSFH37 | 73 | 523045 | AC004611 | 308 | 1-88 |
| | | | | | 1627-1799 |
| | | | | | 3095-3345 |
| HOUFR33 | 74 | 572611 | AL117258 | 309 | 1-1092 |
| | | | | | 2554-3306 |
| | | | | | 3391-3500 |
| | | | | | 3935-3999 |
| | | | | | 5160-5591 |
| HOUFR33 | 74 | 572611 | AL117258 | 310 | 1-55 |
| | | | | | 143-762 |
| | | | | | 1271-1364 |
| | | | | | 1687-3347 |
| | | | | | 3653-3902 |
| | | | | | 4022-4241 |
| | | | | | 4359-4558 |
| | | | | | 4856-5110 |
| HOUFR33 | 74 | 572611 | AL117258 | 311 | 1-390 |
| HDPTG17 | 76 | 693874 | AC025283 | 312 | 1-131 |
| | | | | | 189-746 |
| | | | | | 1031-1170 |
| | | | | | 2801-3980 |
| | | | | | 4265-4875 |
| | | | | | 4971-5927 |
| | | | | | 6129-6854 |
| | | | | | 7166-7257 |
| | | | | | 7536-7664 |
| | | | | | 11021-11520 |
| | | | | | 11543-13337 |
| HDPTG17 | 76 | 693874 | AC004232 | 313 | 1-3202 |
| | | | | | 4359-4672 |
| | | | | | 4952-7449 |
| | | | | | 7734-7873 |
| | | | | | 9504-10953 |
| HDPTG17 | 76 | 693874 | AC025283 | 314 | 1-1024 |
| HDPTG17 | 76 | 693874 | AC025283 | 315 | 1-451 |
| HDPTG17 | 76 | 693874 | AC004232 | 316 | 1-674 |
| | | | | | 3899-4329 |
| HDPTG17 | 76 | 693874 | AC004232 | 317 | 1-361 |
| HDPOH15 | 80 | 909193 | AC012146 | 318 | 1-1022 |
| | | | | | 1390-1707 |
| | | | | | 2215-2780 |
| | | | | | 3211-3608 |
| | | | | | 3687-4162 |
| | | | | | 4905-5600 |
| | | | | | 6109-6178 |
| HDPOH15 | 80 | 909193 | AC012146 | 319 | 1-186 |
| HFPBV40 | 81 | 909194 | AC011815 | 320 | 1-306 |
| | | | | | 319-634 |
| | | | | | 1336-1851 |
| | | | | | 1908-2326 |
| | | | | | 2730-3033 |
| | | | | | 4207-6135 |
| HFPBV40 | 81 | 909194 | AC011815 | 321 | 1-251 |
| HFPBV40 | 81 | 909194 | AC011815 | 322 | 1-246 |
| HWMEG01 | 82 | 915157 | AL109965 | 323 | 1-39 |
| | | | | | 398-587 |
| | | | | | 2095-2486 |
| | | | | | 3778-5828 |
| HHEZD80 | 84 | 921160 | AC022892 | 324 | 1-681 |
| HHEZD80 | 84 | 921160 | AC005410 | 325 | 1-26 |
| | | | | | 2590-2889 |
| | | | | | 3602-3771 |
| | | | | | 4339-5017 |
| | | | | | 6295-6485 |
| | | | | | 6909-6998 |
| | | | | | 7521-8143 |
| | | | | | 8433-8529 |
| | | | | | 9637-9899 |
| | | | | | 10563-10925 |
| | | | | | 11304-11768 |
| | | | | | 12104-12617 |
| | | | | | 13487-13648 |
| | | | | | 13989-14159 |
| | | | | | 15246-15413 |
| | | | | | 15996-16140 |
| | | | | | 16890-17029 |
| | | | | | 18712-20020 |
| HHEZD80 | 84 | 921160 | AC005410 | 326 | 1-1213 |
| | | | | | 1372-2983 |
| | | | | | 3192-3439 |
| | | | | | 4265-5250 |
| HULCB61 | 85 | 923149 | AC016771 | 327 | 1-101 |
| | | | | | 1692-1803 |
| | | | | | 2785-3298 |
| | | | | | 5494-5768 |
| HULCB61 | 85 | 923149 | AC048382 | 328 | 1-129 |
| | | | | | 1721-1832 |
| | | | | | 2814-3328 |
| | | | | | 5524-5893 |
| HULCB61 | 85 | 923149 | AC016771 | 329 | 1-373 |
| HULCB61 | 85 | 923149 | AC048382 | 330 | 1-373 |
| HULCB61 | 85 | 923149 | AC048382 | 331 | 1-326 |
| HUCOF56 | 88 | 951657 | AB022537 | 332 | 1-153 |
| | | | | | 406-478 |
| | | | | | 556-1888 |
| HUCOF56 | 88 | 951657 | AC040962 | 333 | 1-153 |
| | | | | | 406-478 |
| | | | | | 556-2559 |
| | | | | | 2641-2778 |
| | | | | | 3065-3563 |
| | | | | | 3644-3934 |
| | | | | | 4028-4542 |
| | | | | | 4921-4997 |
| | | | | | 5203-5281 |
| | | | | | 5351-5448 |
| | | | | | 5551-5660 |
| | | | | | 5740-6558 |
| | | | | | 6650-6696 |
| | | | | | 6830-7007 |
| | | | | | 7263-7347 |
| | | | | | 7446-7736 |
| HUCOF56 | 88 | 951657 | AC040962 | 334 | 1-130 |
| HUCOF56 | 88 | 951657 | AB022537 | 335 | 1-507 |
| | | | | | 655-757 |
| | | | | | 1322-1886 |
| | | | | | 5346-5901 |
| | | | | | 7691-7795 |
| | | | | | 7989-8217 |
| | | | | | 8255-8406 |
| | | | | | 8513-8620 |
| | | | | | 8865-8931 |
| | | | | | 9048-9133 |
| | | | | | 9155-9372 |
| | | | | | 9512-9595 |
| | | | | | 9702-9915 |
| | | | | | 10001-10139 |
| HUCOF56 | 88 | 951657 | AC040962 | 336 | 1-138 |
| | | | | | 245-352 |
| | | | | | 597-658 |
| | | | | | 780-865 |
| | | | | | 887-1104 |
| | | | | | 1244-1327 |
| | | | | | 1434-1647 |
| | | | | | 1734-1872 |
| HCGLD61 | 90 | 974217 | AC025036 | 337 | 1-148 |
| HCGLD61 | 90 | 974217 | AC011953 | 338 | 1-126 |
| HCGLD61 | 90 | 974217 | AC016327 | 339 | 1-125 |
| HCGLD61 | 90 | 974217 | AC027300 | 340 | 1-158 |
| HCGLD61 | 90 | 974217 | AC022231 | 341 | 1-151 |
| HCGLD61 | 90 | 974217 | AC023881 | 342 | 1-80 |
| HCGLD61 | 90 | 974217 | AC016327 | 343 | 1-165 |
| HCGLD61 | 90 | 974217 | AC048342 | 344 | 1-130 |
| HCGLD61 | 90 | 974217 | AL121656 | 345 | 1-2346 |
| | | | | | 2487-3703 |
| | | | | | 3832-4167 |
| HCGLD61 | 90 | 974217 | AC016327 | 346 | 1-195 |
| HCGLD61 | 90 | 974217 | AC048342 | 347 | 1-118 |
| HCGLD61 | 90 | 974217 | AC023881 | 348 | 1-77 |

[0058] Table 1B summarizes additional polynucleotides encompassed by the invention (including cDNA clones related to the sequences (Clone ID NO:Z), contig sequences (contig identifier (Contig ID:) contig nucleotide sequence identifiers (SEQ ID NO:X)), and genomic sequences (SEQ ID NO:B). The first column provides a unique clone identifier, “Clone ID NO:Z”, for a cDNA clone related to each contig sequence. The second column provides the sequence identifier, “SEQ ID NO:X”, for each contig sequence. The third column provides a unique contig identifier, “Contig ID:” for each contig sequence. The fourth column, provides a BAC identifier “BAC ID NO:A” for the BAC clone referenced in the corresponding row of the table. The fifth column provides the nucleotide sequence identifier, “SEQ ID NO:B” for a fragment of the BAC clone identified in column four of the corresponding row of the table. The sixth column, “Exon From-To”, provides the location (i.e., nucleotide position numbers) within the polynucleotide sequence of SEQ ID NO:B which delineate certain polynucleotides of the invention that are also exemplary members of polynucleotide sequences that encode polypeptides of the invention (e.g., polypeptides containing amino acid sequences encoded by the polynucleotide sequences delineated in column six, and fragments and variants thereof).

TABLE 2

| | | SEQ | | | | Score/ | | |
|---|---|---|---|---|---|---|---|---|
| Clone ID | Contig | ID | Analysis | | PFam/NR Accession | Percent | NT | NT |
| NO:Z | ID: | NO:X | Method | PFam/NR Description | Number | Identity | From | To |
| HCHBA22 | 1103891 | 11 | blastx.14 | (AL008583) dJ327J16.3 | gi\|4160198\|emb\|CAA | 82% | 1 | 555 |
| | | | | (supported by | 15431.1\| | 51% | 533 | 763 |
| | | | | GENSCAN, FGENES and | | 54% | 424 | 456 |
| | | | | GENEWISE) [Homo | | | | |
| | | | | sapiens] | | | | |
| HCHBA22 | 928250 | 91 | HMMER | PFAM: ‘chromo’ | PF00385 | 39.74 | 1 | 75 |
| | | | 1.8 | (CHRromatin | | | | |
| | | | | Organization MOdifier) | | | | |
| | | | | domain | | | | |
| | | | blastx.14 | (AL008583) dJ327J16.3 | gi\|4160198\|emb\|CAA | 100% | 1 | 222 |
| | | | | (novel CHROMObox | 15431.1\| | 86% | 341 | 475 |
| | | | | family protein) [Homo | | 75% | 612 | 683 |
| | | | | sapiens] | | 89% | 523 | 579 |
| | | | | | | 91% | 273 | 308 |
| | | | | | | 100% | 308 | 337 |
| | | | | | | 45% | 546 | 605 |
| | | | | | | 34% | 650 | 736 |
| | | | | | | 54% | 419 | 451 |
| | | | | | | 25% | 239 | 343 |
| | | | | | | 60% | 523 | 552 |
| HEEAA77 | 867727 | 92 | HMMER | PFAM: ‘chromo’ | PF00385 | 65 | 102 | 227 |
| | | | 2.1.1 | (CHRromatin | | | | |
| | | | | Organization MOdifier) | | | | |
| | | | | domain | | | | |
| HDAAV32 | 714803 | 13 | HMMER | PFAM: ‘Cold-shock’ | PF00313 | 73.9 | 256 | 429 |
| | | | 2.1.1 | DNA-binding domain | | | | |
| HTLGM07 | 1158948 | 14 | blastx.14 | (AF096834) germ cell | gi\|4837737\|gb\|AAD3 | 91% | 8 | 370 |
| | | | | specific Y-box binding | 0662.1\| | 61% | 490 | 660 |
| | | | | protein [Homo sapiens] | | 100% | 440 | 532 |
| | | | | | | 100% | 757 | 807 |
| | | | | | | 36% | 707 | 796 |
| | | | | | | 30% | 534 | 650 |
| | | | | | | 28% | 486 | 590 |
| | | | | | | 30% | 571 | 660 |
| | | | | | | 28% | 683 | 766 |
| | | | | | | 34% | 164 | 250 |
| HTLGM07 | 952254 | 93 | HMMER | PFAM: ‘Cold-shock’ | PF00313 | 70.2 | 3 | 158 |
| | | | 2.1.1 | DNA-binding domain | | | | |
| | | | blastx.14 | (AF096834) germ cell | gi\|4837737\|gb\|AAD3 | 90% | 3 | 323 |
| | | | | specific Y-box binding | 0662.1\| | 100% | 393 | 485 |
| | | | | protein [Homo sapiens] | | 100% | 549 | 614 |
| | | | | | | 100% | 711 | 761 |
| | | | | | | 36% | 661 | 750 |
| | | | | | | 28% | 637 | 720 |
| | | | | | | 34% | 117 | 203 |
| | | | | | | 40% | 475 | 519 |
| | | | | | | 63% | 487 | 519 |
| HTLHC14 | 908428 | 15 | HMMER | PFAM: ‘Cold-shock’ | PF00313 | 36.8 | 9 | 95 |
| | | | 2.1.1 | DNA-binding domain | | | | |
| | | | blastx.14 | (AF096834) germ cell | gi\|4837737\|gb\|AAD3 | 88% | 3 | 260 |
| | | | | specific Y-box binding | 0662.1\| | 92% | 330 | 443 |
| | | | | protein [Homo sapiens] | | 62% | 424 | 528 |
| | | | | | | 100% | 539 | 577 |
| | | | | | | 37% | 539 | 625 |
| | | | | | | 34% | 397 | 483 |
| | | | | | | 50% | 519 | 572 |
| | | | | | | 70% | 584 | 613 |
| | | | | | | 28% | 509 | 634 |
| | | | | | | 23% | 342 | 479 |
| | | | | | | 34% | 54 | 140 |
| | | | | | | 37% | 460 | 531 |
| | | | | | | 30% | 256 | 363 |
| | | | | | | 30% | 402 | 479 |
| HAFBC92 | 1150863 | 16 | blastx.14 | PAP-1 [Mus musculus] | gi\|1850098\|dbj\|BAA1 | 96% | 6 | 371 |
| | | | | | 1319.1\| | | | |
| HAFBC92 | 918131 | 94 | HMMER | PFAM: Core histones | PF00125 | 12.13 | 481 | 546 |
| | | | 1.8 | H2A, H2B, H3 and H4 | | | | |
| | | | blastx.14 | PAP-1 [Mus musculus] | gi\|1850098\|dbj\|BAA1 | 96% | 2 | 253 |
| | | | | | 1319.1\| | 72% | 256 | 486 |
| HAPOI92 | 785576 | 17 | HMMER | PFAM: Domain of | PF01661 | 28.5 | 370 | 483 |
| | | | 2.1.1 | unknown function | | | | |
| HAVNO06 | 933954 | 95 | HMMER | PFAM: Core histones | PF00125 | 12.27 | 229 | 294 |
| | | | 1.8 | H2A, H2B, H3 and H4 | | | | |
| HBAGY72 | 859099 | 19 | HMMER | PFAM: Core histones | PF00125 | 13.75 | 147 | 224 |
| | | | 1.8 | H2A, H2B, H3 and H4 | | | | |
| HBGMF11 | 966133 | 96 | HMMER | PFAM: Core histones | PF00125 | 13.54 | 440 | 517 |
| | | | 1.8 | H2A, H2B, H3 and H4 | | | | |
| HBGQQ95 | 1151377 | 21 | blastx.14 | (AK000570) unnamed | gi\|7020755\|dbj\|BAA9 | 100% | 139 | 321 |
| | | | | protein product [Homo | 1261.1\| | | | |
| | | | | sapiens] | | | | |
| HBGQQ95 | 959696 | 97 | HMMER | PFAM: Core histones | PF00125 | 12.37 | 468 | 545 |
| | | | 1.8 | H2A, H2B, H3 and H4 | | | | |
| HBNAY35 | 675638 | 98 | HMMER | PFAM: Core histones | PF00125 | 13.67 | 160 | 71 |
| | | | 1.8 | H2A, H2B, H3 and H4 | | | | |
| HCFCJ21 | 671028 | 99 | HMMER | PFAM: Core histones | PF00125 | 12.79 | 123 | 188 |
| | | | 1.8 | H2A, H2B, H3 and H4 | | | | |
| HCRMZ59 | 922431 | 24 | HMMER | PFAM: Core histones | PF00125 | 12.81 | 159 | 236 |
| | | | 1.8 | H2A, H2B, H3 and H4 | | | | |
| HCRNM87 | 951839 | 25 | HMMER | PFAM: Core histones | PF00125 | 14.67 | 225 | 314 |
| | | | 1.8 | H2A, H2B, H3 and H4 | | | | |
| HCROG94 | 963356 | 100 | HMMER | PFAM: Core histones | PF00125 | 13.93 | 260 | 337 |
| | | | 1.8 | H2A, H2B, H3 and H4 | | | | |
| HDPFZ70 | 709684 | 101 | HMMER | PFAM: Core histones | PF00125 | 13.5 | 662 | 745 |
| | | | 1.8 | H2A, H2B, H3 and H4 | | | | |
| HDPWU54 | 969288 | 28 | HMMER | PFAM: Core histones | PF00125 | 12.74 | 150 | 79 |
| | | | 1.8 | H2A, H2B, H3 and H4 | | | | |
| HDTAA31 | 937609 | 103 | HMMER | PFAM: Core histones | PF00125 | 12.8 | 1331 | 1408 |
| | | | 1.8 | H2A, H2B, H3 and H4 | | | | |
| HDTAA31 | 941948 | 104 | HMMER | PFAM: Core histones | PF00125 | 12.8 | 1331 | 1408 |
| | | | 1.8 | H2A, H2B, H3 and H4 | | | | |
| HDTFW91 | 761627 | 105 | HMMER | PFAM: Core histones | PF00125 | 15.93 | 535 | 618 |
| | | | 1.8 | H2A, H2B, H3 and H4 | | | | |
| HEQBP52 | 919171 | 107 | HMMER | PFAM: Core histones | PF00125 | 13.27 | 1674 | 1751 |
| | | | 1.8 | H2A, H2B, H3 and H4 | | | | |
| HFKIE07 | 969034 | 108 | HMMER | PFAM: Core histones | PF00125 | 154.27 | 269 | 616 |
| | | | 1.8 | H2A, H2B, H3 and H4 | | | | |
| | | | blastx.14 | (AF054174) histone | gi\|3341992\|gb\|AAC3 | 66% | 773 | 1378 |
| | | | | macroH2A1.2 [Homo | 9908.1\| | 84% | 314 | 661 |
| | | | | sapiens] | | | | |
| HHAMC07 | 952286 | 109 | HMMER | PFAM: Core histones | PF00125 | 14.74 | 218 | 301 |
| | | | 1.8 | H2A, H2B, H3 and H4 | | | | |
| HHBEG80 | 951688 | 34 | HMMER | PFAM: Core histones | PF00125 | 12.4 | 371 | 436 |
| | | | 1.8 | H2A, H2B, H3 and H4 | | | | |
| HHBEM70 | 756949 | 35 | HMMER | PFAM: Core histones | PF00125 | 13.08 | 144 | 215 |
| | | | 1.8 | H2A, H2B, H3 and H4 | | | | |
| HHEQE88 | 754998 | 110 | HMMER | PFAM: Core histones | PF00125 | 15.56 | 148 | 231 |
| | | | 1.8 | H2A, H2B, H3 and H4 | | | | |
| HHSFC32 | 698657 | 111 | HMMER | PFAM: Core histones | PF00125 | 12.42 | 406 | 471 |
| | | | 1.8 | H2A, H2B, H3 and H4 | | | | |
| HHSFI32 | 965149 | 112 | HMMER | PFAM: Core histones | PF00125 | 14.02 | 163 | 240 |
| | | | 1.8 | H2A, H2B, H3 and H4 | | | | |
| HJABA68 | 868322 | 113 | HMMER | PFAM: Core histones | PF00125 | 13.2 | 1290 | 1367 |
| | | | 1.8 | H2A, H2B, H3 and H4 | | | | |
| HLDOX35 | 831549 | 114 | HMMER | PFAM: Core histones | PF00125 | 14.37 | 258 | 335 |
| | | | 1.8 | H2A, H2B, H3 and H4 | | | | |
| HLYCF37 | 949401 | 41 | HMMER | PFAM: Core histones | PF00125 | 12.84 | 1249 | 1326 |
| | | | 1.8 | H2A, H2B, H3 and H4 | | | | |
| HLYHK34 | 703776 | 115 | HMMER | PFAM: Core histones | PF00125 | 13.18 | 436 | 519 |
| | | | 1.8 | H2A, H2B, H3 and H4 | | | | |
| HMUAB01 | 926729 | 116 | HMMER | PFAM: Core histones | PF00125 | 12.37 | 320 | 385 |
| | | | 1.8 | H2A, H2B, H3 and H4 | | | | |
| HMVDU16 | 904807 | 117 | HMMER | PFAM: Core histones | PF00125 | 13.38 | 1252 | 1329 |
| | | | 1.8 | H2A, H2B, H3 and H4 | | | | |
| HOGCL27 | 963291 | 118 | HMMER | PFAM: Core histones | PF00125 | 12.42 | 910 | 975 |
| | | | 1.8 | H2A, H2B, H3 and H4 | | | | |
| HOSED04 | 615209 | 119 | HMMER | PFAM: Core histones | PF00125 | 14.01 | 74 | 3 |
| | | | 1.8 | H2A, H2B, H3 and H4 | | | | |
| HOVAP01 | 693308 | 120 | HMMER | PFAM: Core histones | PF00125 | 13.61 | 213 | 287 |
| | | | 1.8 | H2A, H2B, H3 and H4 | | | | |
| HPCPN11 | 965420 | 121 | HMMER | PFAM: Core histones | PF00125 | 14.25 | 305 | 376 |
| | | | 1.8 | H2A, H2B, H3 and H4 | | | | |
| HPLAS10 | 503774 | 49 | HMMER | PFAM: Core histones | PF00125 | 12 | 72 | 1 |
| | | | 1.8 | H2A, H2B, H3 and H4 | | | | |
| HPQCK13 | 656324 | 122 | HMMER | PFAM: Core histones | PF00125 | 12.9 | 152 | 217 |
| | | | 1.8 | H2A, H2B, H3 and H4 | | | | |
| HSVAJ47 | 925849 | 123 | HMMER | PFAM: Core histones | PF00125 | 11.98 | 507 | 584 |
| | | | 1.8 | H2A, H2B, H3 and H4 | | | | |
| HSYDH59 | 957745 | 124 | HMMER | PFAM: Core histones | PF00125 | 13.26 | 1203 | 1280 |
| | | | 1.8 | H2A, H2B, H3 and H4 | | | | |
| HTTEV13 | 868402 | 125 | HMMER | PFAM: Core histones | PF00125 | 15.27 | 1215 | 1292 |
| | | | 1.8 | H2A, H2B, H3 and H4 | | | | |
| HTWCG65 | 869547 | 126 | HMMER | PFAM: Core histones | PF00125 | 15.45 | 220 | 306 |
| | | | 1.8 | H2A, H2B, H3 and H4 | | | | |
| HULAI37 | 708923 | 127 | HMMER | PFAM: Core histones | PF00125 | 13.48 | 99 | 173 |
| | | | 1.8 | H2A, H2B, H3 and H4 | | | | |
| HUSXZ80 | 917002 | 128 | HMMER | PFAM: Core histones | PF00125 | 14.08 | 239 | 310 |
| | | | 1.8 | H2A, H2B, H3 and H4 | | | | |
| HUSYN11 | 943237 | 129 | HMMER | PFAM: Core histones | PF00125 | 13.67 | 238 | 315 |
| | | | 1.8 | H2A, H2B, H3 and H4 | | | | |
| | | | blastx.2 | (AL137556) hypothetical | emb\|CAB70810.1\| | 67% | 137 | 319 |
| | | | | protein [Homo sapiens] | | 96% | 240 | 320 |
| | | | | | | 96% | 241 | 321 |
| HVAEI40 | 969204 | 130 | HMMER | PFAM: Core histones | PF00125 | 14.08 | 477 | 554 |
| | | | 1.8 | H2A, H2B, H3 and H4 | | | | |
| HVAET61 | 965365 | 131 | HMMER | PFAM: Core histones | PF00125 | 14.22 | 603 | 695 |
| | | | 1.8 | H2A, H2B, H3 and H4 | | | | |
| HWLBU68 | 757225 | 132 | HMMER | PFAM: Core histones | PF00125 | 15.11 | 270 | 356 |
| | | | 1.8 | H2A, H2B, H3 and H4 | | | | |
| HWLQB94 | 959664 | 133 | HMMER | PFAM: Core histones | PF00125 | 13.16 | 86 | 169 |
| | | | 1.8 | H2A, H2B, H3 and H4 | | | | |
| HWLQG27 | 953864 | 134 | HMMER | PFAM: Core histones | PF00125 | 13.71 | 142 | 219 |
| | | | 1.8 | H2A, H2B, H3 and H4 | | | | |
| HWLQZ02 | 918869 | 63 | HMMER | PFAM: Core histones | PF00125 | 16.93 | 112 | 204 |
| | | | 1.8 | H2A, H2B, H3 and H4 | | | | |
| HWLRB78 | 918522 | 135 | HMMER | PFAM: Core histones | PF00125 | 14.95 | 88 | 5 |
| | | | 1.8 | H2A, H2B, H3 and H4 | | | | |
| HWMNE82 | 968643 | 65 | HMMER | PFAM: Core histones | PF00125 | 12.35 | 124 | 195 |
| | | | 1.8 | H2A, H2B, H3 and H4 | | | | |
| HWWFC08 | 1151537 | 66 | blastx.14 | (AC004877) sco-spondin- | gi\|3638957\|gb\|AAC3 | 57% | 195 | 236 |
| | | | | mucin-like; similar to | 6301.1\| | 35% | 104 | 205 |
| | | | | P98167 1 sapiens] | | 57% | 147 | 188 |
| | | | | | | 58% | 352 | 387 |
| | | | | | | 31% | 214 | 261 |
| | | | | | | 75% | 129 | 152 |
| | | | | | | 56% | 290 | 337 |
| | | | | | | 45% | 349 | 381 |
| | | | | | | 50% | 87 | 128 |
| | | | | | | 42% | 132 | 188 |
| | | | | | | 83% | 420 | 437 |
| | | | | | | 41% | 399 | 434 |
| | | | | | | 53% | 321 | 359 |
| | | | | | | 46% | 229 | 273 |
| | | | | | | 31% | 169 | 234 |
| | | | | | | 35% | 78 | 137 |
| | | | | | | 41% | 297 | 332 |
| HWWFC08 | 933752 | 136 | HMMER | PFAM: Core histones | PF00125 | 12.29 | 624 | 701 |
| | | | 1.8 | H2A, H2B, H3 and H4 | | | | |
| HWWFY87 | 958226 | 137 | HMMER | PFAM: Core histones | PF00125 | 14.76 | 557 | 637 |
| | | | 1.8 | H2A, H2B, H3 and H4 | | | | |
| HYAAS55 | 1151540 | 68 | blastx.14 | (AF151857) CGI-99 | gi\|4929667\|gb\|AAD3 | 79% | 832 | 1035 |
| | | | | protein [Homo sapiens] | 4094.1\|AF151857_1 | | | |
| HYAAS55 | 969584 | 138 | HMMER | PFAM: Core histones | PF00125 | 14.02 | 706 | 777 |
| | | | 1.8 | H2A, H2B, H3 and H4 | | | | |
| HELFT59 | 745571 | 69 | HMMER | PFAM: ‘Cold-shock’ | PF00313 | 30.3 | 112 | 237 |
| | | | 2.1.1 | DNA-binding domain | | | | |
| HTLBG23 | 908391 | 70 | HMMER | PFAM: ‘Cold-shock’ | PF00313 | 35.5 | 17 | 127 |
| | | | 2.1.1 | DNA-binding domain | | | | |
| | | | blastx.14 | PIPPin protein [Rattus | gi\|1050754\|emb\|CAA | 97% | 2 | 250 |
| | | | | norvegicus] | 62001.1\| | | | |
| HKGCC54 | 968183 | 71 | HMMER | PFAM: ‘chromo’ | PF00385 | 35.7 | 56 | 118 |
| | | | 2.1.1 | (CHRromatin | | | | |
| | | | | Organization MOdifier) | | | | |
| | | | | domain | | | | |
| HBXDN39 | 508449 | 72 | HMMER | PFAM: SCAN domain | PF02023 | 29.8 | 304 | 363 |
| | | | 2.1.1 | | | | | |
| HUSFH37 | 523045 | 73 | HMMER | PFAM: SAP domain | PF02037 | 34.8 | 190 | 258 |
| | | | 2.1.1 | | | | | |
| HOUFR33 | 572611 | 74 | HMMER | PFAM: SAP domain | PF02037 | 49.9 | 30 | 134 |
| | | | 2.1.1 | | | | | |
| HFKFM24 | 677398 | 75 | HMMER | PFAM: AsnC family | PF01037 | 29.8 | 486 | 551 |
| | | | 2.1.1 | | | | | |
| HDPTG17 | 693874 | 76 | HMMER | PFAM: SCAN domain | PF02023 | 173.1 | 364 | 651 |
| | | | 2.1.1 | | | | | |
| HFITZ54 | 729592 | 77 | HMMER | PFAM: SCAN domain | PF02023 | 30.3 | 279 | 344 |
| | | | 2.1.1 | | | | | |
| HNTCQ86 | 784814 | 78 | HMMER | PFAM: CXXC zinc finger | PF02008 | 51.7 | 64 | 204 |
| | | | 2.1.1 | | | | | |
| HNTCJ76 | 908945 | 79 | HMMER | PFAM: SCAN domain | PF02023 | 236.9 | 707 | 988 |
| | | | 2.1.1 | | | | | |
| HDPOH15 | 909193 | 80 | HMMER | PFAM: SCAN domain | PF02023 | 27.8 | 407 | 466 |
| | | | 2.1.1 | | | | | |
| HFPBV40 | 909194 | 81 | HMMER | PFAM: SCAN domain | PF02023 | 68 | 265 | 369 |
| | | | 2.1.1 | | | | | |
| | | | blastx.14 | dJ29K1.2 [Homo sapiens] | gi\|2924250\|emb\|CAB | 62% | 371 | 658 |
| | | | | | 11428.1\| | 56% | 269 | 553 |
| | | | | | | 75% | 271 | 369 |
| | | | | | | 42% | 644 | 700 |
| | | | | | | 25% | 467 | 547 |
| | | | | | | 42% | 644 | 700 |
| HWMEG01 | 915157 | 82 | HMMER | PFAM: SCANdomain | PF02023 | 119.2 | 417 | 614 |
| | | | 2.1.1 | | | | | |
| | | | blastx.14 | (AF106473) leucine-rich- | gi\|4336855\|gb\|AAD1 | 68% | 402 | 650 |
| | | | | domain inter-acting | 7989.1\| | 62% | 159 | 206 |
| | | | | protein 1 | | | | |
| HE8TO32 | 918867 | 83 | HMMER | PFAM: CTF/NF-I family | PF00859 | 114.5 | 1 | 408 |
| | | | 2.1.1 | | | | | |
| | | | blastx.14 | NFI-A3 [Rattus | gi\|1041036\|dbj\|BAA1 | 100% | 4 | 168 |
| | | | | norvegicus] | 1205.1\| | 70% | 265 | 408 |
| HHEZD80 | 921160 | 84 | HMMER | PFAM: SCAN domain | PF02023 | 180.9 | 393 | 650 |
| | | | 2.1.1 | | | | | |
| | | | blastx.14 | (AF027219) ZNF202 beta | gi\|3869259\|gb\|AAC7 | 56% | 333 | 662 |
| | | | | [Homo sapiens] | 9941.1\| | 40% | 644 | 718 |
| HULCB61 | 923149 | 85 | HMMER | PFAM: SCAN domain | PF02023 | 154.3 | 361 | 627 |
| | | | 2.1.1 | | | | | |
| | | | blastx.14 | Zfp-29 [Mus musculus] | gi\|55471\|emb\|CAA38 | 81% | 406 | 615 |
| | | | | | 920.1\| | 82% | 274 | 414 |
| | | | | | | 61% | 214 | 321 |
| | | | | | | 47% | 735 | 791 |
| HDMBB39 | 930905 | 86 | HMMER | PFAM: CXXC zinc finger | PF02008 | 48 | 542 | 682 |
| | | | 2.1.1 | | | | | |
| | | | blastx.14 | (AJ007041) trithorax | gi\|5123787\|emb\|CAB | 55% | 596 | 682 |
| | | | | homologue 2 [Homo | 45385.1\| | 37% | 746 | 832 |
| | | | | sapiens] | | 50% | 764 | 817 |
| | | | | | | 31% | 428 | 532 |
| | | | | | | 24% | 258 | 356 |
| | | | | | | 38% | 767 | 820 |
| | | | | | | 36% | 470 | 535 |
| | | | | | | 36% | 434 | 532 |
| | | | | | | 28% | 434 | 508 |
| | | | | | | 35% | 860 | 901 |
| HKADW47 | 943680 | 87 | HMMER | PFAM: CXXC zinc finger | PF02008 | 61.4 | 242 | 382 |
| | | | 2.1.1 | | | | | |
| | | | blastx.2 | (AL133572) hypothetical | emb\|CAB63721.1\| | 93% | 161 | 550 |
| | | | | protein [Homo sapiens] | | | | |
| HUCOF56 | 951657 | 88 | HMMER | PFAM: KE2 family | PF01920 | 213.7 | 111 | 461 |
| | | | 2.1.1 | protein | | | | |
| | | | blastx.14 | HKE2 [Homo sapiens] | gi\|2648022\|emb\|CAB | 100% | 108 | 452 |
| | | | | | 09993.1\| | | | |
| HHATZ53 | 966374 | 89 | HMMER | PFAM: SAP domain | PF02037 | 34.4 | 192 | 296 |
| | | | 2.1.1 | | | | | |
| HCGLD61 | 974217 | 90 | HMMER | PFAM: SAP domain | PF02037 | 32.1 | 222 | 326 |
| | | | 2.1.1 | | | | | |

[0059] Table 2 further characterizes certain encoded polypeptides of the invention, by providing the results of comparisons to protein and protein family databases. The first column provides a unique clone identifier, “Clone ID NO:”, corresponding to a cDNA clone disclosed in Table 1A. The second column provides the unique contig identifier, “Contig ID:” which allows correlation with the information in Table 1A. The third column provides the sequence identifier, “SEQ ID NO:”, for the contig polynucleotide sequences. The fourth column provides the analysis method by which the homology/identity disclosed in the Table was determined. The fifth column provides a description of the PFAM/NR hit identified by each analysis. Column six provides the accession number of the PFAM/NR hit disclosed in the fifth column. Column seven, score/percent identity, provides a quality score or the percent identity, of the hit disclosed in column five. Comparisons were made between polypeptides encoded by polynucleotides of the invention and a non-redundant protein database (herein referred to as “NR”), or a database of protein families (herein referred to as “PFAM”), as described below.

[0060] The NR database, which comprises the NBRF PIR database, the NCBI GenPept database, and the SIB SwissProt and TrEMBL databases, was made non-redundant using the computer program nrdb2 (Warren Gish, Washington University in Saint Louis). Each of the polynucleotides shown in Table 1A, column 3 (e.g., SEQ ID NO:X or the ‘Query’ sequence) was used to search against the NR database. The computer program BLASTX was used to compare a 6-frame translation of the Query sequence to the NR database (for information about the BLASTX algorithm please see Altshul et al., J. Mol. Biol. 215:403-410 (1990); and Gish and States, Nat. Genet. 3:266-272 (1993). A description of the sequence that is most similar to the Query sequence (the highest scoring ‘Subject’) is shown in column five of Table 2 and the database accession number for that sequence is provided in column six. The highest scoring ‘Subject’ is reported in Table 2 if (a) the estimated probability that the match occurred by chance alone is less than 1.0e-07, and (b) the match was not to a known repetitive element. BLASTX returns alignments of short polypeptide segments of the Query and Subject sequences which share a high degree of similarity; these segments are known as High-Scoring Segment Pairs or HSPs. Table 2 reports the degree of similarity between the Query and the Subject for each HSP as a percent identity in Column 7. The percent identity is determined by dividing the number of exact matches between the two aligned sequences in the HSP, dividing by the number of Query amino acids in the HSP and multiplying by 100. The polynucleotides of SEQ ID NO:X which encode the polypeptide sequence that generates an HSP are delineated by columns 8 and 9 of Table 2.

[0061] The PFAM database, PFAM version 2.1, (Sonnhammer et al., Nucl. Acids Res., 26:320-322, 1998)) consists of a series of multiple sequence alignments; one alignment for each protein family. Each multiple sequence alignment is converted into a probability model called a Hidden Markov Model, or HMM, that represents the position-specific variation among the sequences that make up the multiple sequence alignment (see, e.g., Durbin et al., Biological sequence analysis: probabilistic models of proteins and nucleic acids, Cambridge University Press, 1998 for the theory of HMMs). The program HMMER version 1.8 (Sean Eddy, Washington University in Saint Louis) was used to compare the predicted protein sequence for each Query sequence (SEQ ID NO:Y in Table 1A) to each of the HMMs derived from PFAM version 2.1. A HMM derived from PFAM version 2.1 was said to be a significant match to a polypeptide of the invention if the score returned by HMMER 1.8 was greater than 0.8 times the HMMER 1.8 score obtained with the most distantly related known member of that protein family. The description of the PFAM family which shares a significant match with a polypeptide of the invention is listed in column 5 of Table 2, and the database accession number of the PFAM hit is provided in column 6. Column 7 provides the score returned by HMMER version 1.8 for the alignment. Columns 8 and 9 delineate the polynucleotides of SEQ ID NO:X which encode the polypeptide sequence which show a significant match to a PFAM protein family.

[0062] As mentioned, columns 8 and 9 in Table 2, “NT From” and “NT To”, delineate the polynucleotides of “SEQ ID NO:X” that encode a polypeptide having a significant match to the PFAM/NR database as disclosed in the fifth column. In one embodiment, the invention provides a protein comprising, or alternatively consisting of, a polypeptide encoded by the polynucleotides of SEQ ID NO:X delineated in columns 8 and 9 of Table 2. Also provided are polynucleotides encoding such proteins, and the complementary strand thereto.

[0063] The nucleotide sequence SEQ ID NO:X and the translated SEQ ID NO:Y are sufficiently accurate and otherwise suitable for a variety of uses well known in the art and described further below. For instance, the nucleotide sequences of SEQ ID NO:X are useful for designing nucleic acid hybridization probes that will detect nucleic acid sequences contained in SEQ ID NO:X or the cDNA contained in Clone ID NO:Z. These probes will also hybridize to nucleic acid molecules in biological samples, thereby enabling immediate applications in chromosome mapping, linkage analysis, tissue identification and/or typing, and a variety of forensic and diagnostic methods of the invention. Similarly, polypeptides identified from SEQ ID NO:Y may be used to generate antibodies which bind specifically to these polypeptides, or fragments thereof, and/or to the polypeptides encoded by the cDNA clones identified in, for example, Table 1A.

[0064] Nevertheless, DNA sequences generated by sequencing reactions can contain sequencing errors. The errors exist as misidentified nucleotides, or as insertions or deletions of nucleotides in the generated DNA sequence. The erroneously inserted or deleted nucleotides cause frame shifts in the reading frames of the predicted amino acid sequence. In these cases, the predicted amino acid sequence diverges from the actual amino acid sequence, even though the generated DNA sequence may be greater than 99.9% identical to the actual DNA sequence (for example, one base insertion or deletion in an open reading frame of over 1000 bases).

[0065] Accordingly, for those applications requiring precision in the nucleotide sequence or the amino acid sequence, the present invention provides not only the generated nucleotide sequence identified as SEQ ID NO:X, and a predicted translated amino acid sequence identified as SEQ ID NO:Y, but also a sample of plasmid DNA containing cDNA Clone ID NO:Z (deposited with the ATCC on Oct. 5, 2000, and receiving ATCC designation numbers PTA 2574 and PTA 2575; deposited with the ATCC on January 5, 2001, and having depositor reference numbers TS-1, TS-2, AC-1, and AC-2; and/or as set forth, for example, in Table 1A, 6 and 7). The nucleotide sequence of each deposited clone can readily be determined by sequencing the deposited clone in accordance with known methods. Further, techniques known in the art can be used to verify the nucleotide sequences of SEQ ID NO:X.

[0066] The predicted amino acid sequence can then be verified from such deposits. Moreover, the amino acid sequence of the protein encoded by a particular clone can also be directly determined by peptide sequencing or by expressing the protein in a suitable host cell containing the deposited human cDNA, collecting the protein, and determining its sequence.

[0067] RACE Protocol for Recovery of Full-length Genes

[0068] Partial cDNA clones can be made full-length by utilizing the rapid amplification of cDNA ends (RACE) procedure described in Frohman, M. A., et al., Proc. Nat'l. Acad. Sci. USA, 85:8998-9002 (1988). A cDNA clone missing either the 5′ or 3′ end can be reconstructed to include the absent base pairs extending to the translational start or stop codon, respectively. In some cases, cDNAs are missing the start codon of translation, therefor. The following briefly describes a modification of this original 5′ RACE procedure. Poly A+ or total RNA is reverse transcribed with Superscript II (Gibco/BRL) and an antisense or complementary primer specific to the cDNA sequence. The primer is removed from the reaction with a Microcon Concentrator (Amicon). The first-strand cDNA is then tailed with dATP and terminal deoxynucleotide transferase (Gibco/BRL). Thus, an anchor sequence is produced which is needed for PCR amplification. The second strand is synthesized from the dA-tail in PCR buffer, Taq DNA polymerase (Perkin-Elmer Cetus), an oligo-dT primer containing three adjacent restriction sites (XhoI, SalI and ClaI) at the 5′ end and a primer containing just these restriction sites. This double-stranded cDNA is PCR amplified for 40 cycles with the same primers as well as a nested cDNA-specific antisense primer. The PCR products are size-separated on an ethidium bromide-agarose gel and the region of gel containing cDNA products the predicted size of missing protein-coding DNA is removed. cDNA is purified from the agarose with the Magic PCR Prep kit (Promega), restriction digested with XhoI or SalI, and ligated to a plasmid such as pBluescript SKII (Stratagene) at XhoI and EcoRV sites. This DNA is transformed into bacteria and the plasmid clones sequenced to identify the correct protein-coding inserts. Correct 5′ ends are confirmed by comparing this sequence with the putatively identified homologue and overlap with the partial cDNA clone. Similar methods known in the art and/or commercial kits are used to amplify and recover 3′ ends.

[0069] Several quality-controlled kits are commercially available for purchase. Similar reagents and methods to those above are supplied in kit form from Gibco/BRL for both 5′ and 3′ RACE for recovery of full length genes. A second kit is available from Clontech which is a modification of a related technique, SLIC (single-stranded ligation to single-stranded cDNA), developed by Dumas et al., Nucleic Acids Res., 19:5227-32 (1991). The major differences in procedure are that the RNA is alkaline hydrolyzed after reverse transcription and RNA ligase is used to join a restriction site-containing anchor primer to the first-strand cDNA. This obviates the necessity for the dA-tailing reaction which results in a polyT stretch that is difficult to sequence past.

[0070] An alternative to generating 5′ or 3′ cDNA from RNA is to use cDNA library double-stranded DNA. An asymmetric PCR-amplified antisense cDNA strand is synthesized with an antisense cDNA-specific primer and a plasmid-anchored primer. These primers are removed and a symmetric PCR reaction is performed with a nested cDNA-specific antisense primer and the plasmid-anchored primer.

[0071] RNA Ligase Protocol for Generating the 5′ or 3 ′ End Sequences to Obtain Full Length Genes

[0072] Once a gene of interest is identified, several methods are available for the identification of the 5′ or 3′ portions of the gene which may not be present in the original cDNA plasmid. These methods include, but are not limited to, filter probing, clone enrichment using specific probes and protocols similar and identical to 5′ and 3′ RACE. While the full length gene may be present in the library and can be identified by probing, a useful method for generating the 5′ or 3′ end is to use the existing sequence information from the original cDNA to generate the missing information. A method similar to 5′ RACE is available for generating the missing 5′ end of a desired full-length gene. (This method was published by Fromont-Racine et al., Nucleic Acids Res., 21(7): 1683-1684 (1993)). Briefly, a specific RNA oligonucleotide is ligated to the 5′ ends of a population of RNA presumably containing full-length gene RNA transcript and a primer set containing a primer specific to the ligated RNA oligonucleotide and a primer specific to a known sequence of the gene of interest, is used to PCR amplify the 5′ portion of the desired full length gene which may then be sequenced and used to generate the full length gene. This method starts with total RNA isolated from the desired source, poly A RNA may be used but is not a prerequisite for this procedure. The RNA preparation may then be treated with phosphatase if necessary to eliminate 5′ phosphate groups on degraded or damaged RNA which may interfere with the later RNA ligase step. The phosphatase if used is then inactivated and the RNA is treated with tobacco acid pyrophosphatase in order to remove the cap structure present at the 5′ ends of messenger RNAs. This reaction leaves a 5′ phosphate group at the 5′ end of the cap cleaved RNA which can then be ligated to an RNA oligonucleotide using T4 RNA ligase. This modified RNA preparation can then be used as a template for first. strand cDNA synthesis using a gene specific oligonucleotide. The first strand synthesis—reaction can then be used as a template for PCR amplification of the desired 5′ end using a primer specific to the ligated RNA oligonucleotide and a primer specific to the known sequence of the gene of interest. The resultant product is then sequenced and analyzed to confirm that the 5′ end sequence belongs to the relevant gene.

[0073] The present invention also relates to vectors or plasmids which include such DNA sequences, as well as the use of the DNA sequences. The material deposited with the ATCC (deposited with the ATCC on Oct. 5, 2000, and receiving ATCC designation numbers PTA 2574 and PTA 2575; deposited with the ATCC on Jan. 5, 2001, and receiving ATCC designation numbers TS-1, TS-2, AC-1, and AC-2; and/or as set forth, for example, in Table 1A, Table 6, or Table 7) is a mixture of cDNA clones derived from a variety of human tissue and cloned in either a plasmid vector or a phage vector, as described, for example, in Table 7. These deposits are referred to as “the deposits” herein. The tissues from which some of the clones were derived are listed in Table 7, and the vector in which the corresponding cDNA is contained is also indicated in Table 7. The deposited material includes cDNA clones corresponding to SEQ ID NO:X described, for example, in Table 1A (Clone ID NO:Z). A clone which is isolatable from the ATCC Deposits by use of a sequence listed as SEQ ID NO:X, may include the entire coding region of a human gene or in other cases such clone may include a substantial portion of the coding region of a human gene. Furthermore, although the sequence listing may in some instances list only a portion of the DNA sequence in a clone included in the ATCC Deposits, it is well within the ability of one skilled in the art to sequence the DNA included in a clone contained in the ATCC Deposits by use of a sequence (or portion thereof) described in, for example Tables 1A or 2 by procedures hereinafter further described, and others apparent to those skilled in the art.

[0074] Also provided in Table 7 is the name of the vector which contains the cDNA clone. Each vector is routinely used in the art. The following additional information is provided for convenience.

[0075] Vectors Lambda Zap (U.S. Pat. Nos. 5,128,256 and 5,286,636), Uni-Zap XR (U.S. Pat. Nos. 5,128, 256 and 5,286,636), Zap Express (U.S. Pat. Nos. 5,128,256 and 5,286,636), pBluescript (pBS) (Short, J. M. et al., Nucleic Acids Res. 16:7583-7600 (1988); Alting-Mees, M. A. and Short, J. M., Nucleic Acids Res. 17:9494 (1989)) and pBK (Alting-Mees, M. A. et al., Strategies 5.58-61 (1992)) are commercially available from Stratagene Cloning Systems, Inc., 11011 N. Torrey Pines Road, La Jolla, Calif., 92037. pBS contains an ampicillin resistance gene and pBK contains a neomycin resistance gene. Phagemid pBS may be excised from the Lambda Zap and Uni-Zap XR vectors, and phagemid pBK may be excised from the Zap Express vector. Both phagemids may be transformed into E. coli strain XL-1 Blue, also available from Stratagene.

[0076] Vectors pSport1, pCMVSport 1.0, pCMVSport 2.0 and pCMVSport 3.0, were obtained from Life Technologies, Inc., P.O. Box 6009, Gaithersburg, Md. 20897. All Sport vectors contain an ampicillin resistance gene and may be transformed into E. coli strain DH1OB, also available from Life Technologies. See, for instance, Gruber, C. E., et al., Focus 15:59(1993). Vector lafinid BA (Bento Soares, Columbia University, New York, N.Y.) contains an ampicillin resistance gene and can be transformed into E. coli strain XL-1 Blue. Vector pCR®2.1, which is available from Invitrogen, 1600 Faraday Avenue, Carlsbad, Calif. 92008, contains an ampicillin resistance gene and may be transformed into E. coli strain DH10B, available from Life Technologies. See, for instance, Clark, J. M., Nuc. Acids Res. 16:9677-9686 (1988) and Mead, D. et al., Bio/Technology 9. (1991).

[0077] The present invention also relates to the genes corresponding to SEQ ID NO:X, SEQ ID NO:Y, and/or the deposited clone (Clone ID NO:Z). The corresponding gene can be isolated in accordance with known methods using the sequence information disclosed herein. Such methods include preparing probes or primers from the disclosed sequence and identifying or amplifying the corresponding gene from appropriate sources of genomic material.

[0078] Also provided in the present invention are allelic variants, orthologs, and/or species homologs. Procedures known in the art can be used to obtain full-length genes, allelic variants, splice variants, full-length coding portions, orthologs, and/or species homologs of genes corresponding to SEQ ID NO:X or the complement thereof, polypeptides encoded by genes corresponding to SEQ ID NO:X or the complement thereof, and/or the cDNA contained in Clone ID NO:Z, using information from the sequences disclosed herein or the clones deposited with the ATCC. For example, allelic variants and/or species homologs may be isolated and identified by making suitable probes or primers from the sequences provided herein and screening a suitable nucleic acid source for allelic variants and/or the desired homologue.

[0079] The polypeptides of the invention can be prepared in any suitable manner. Such polypeptides include isolated naturally occurring polypeptides, recombinantly produced polypeptides, synthetically produced polypeptides, or polypeptides produced by a combination of these methods. Means for preparing such polypeptides are well understood in the art.

[0080] The polypeptides may be in the form of the secreted protein, including the mature form, or may be a part of a larger protein, such as a fusion protein (see below). It is often advantageous to include an additional amino acid sequence which contains secretory or leader sequences, pro-sequences, sequences which aid in purification, such as multiple histidine residues, or an additional sequence for stability during recombinant production.

[0081] The polypeptides of the present invention are preferably provided in an isolated form, and preferably are substantially purified. A recombinantly produced version of a polypeptide, including the secreted polypeptide, can be substantially purified using techniques described herein or otherwise known in the art, such as, for example, by the one-step method described in Smith and Johnson, Gene 67:3140 (1988). Polypeptides of the invention also can be purified from natural, synthetic or recombinant sources using techniques described herein or otherwise known in the art, such as, for example, antibodies of the invention raised against the polypeptides of the present invention in methods which are well known in the art.

[0082] The present invention provides a polynucleotide comprising, or alternatively consisting of, the nucleic acid sequence of SEQ ID NO:X, and/or the cDNA sequence contained in Clone ID NO:Z. The present invention also provides a polypeptide comprising, or alternatively, consisting of, the polypeptide sequence of SEQ ID NO:Y, a polypeptide encoded by SEQ ID NO:X or a complement thereof, a polypeptide encoded by the cDNA contained in Clone ID NO:Z, and/or the polypeptide sequence encoded by a nucleotide sequence in SEQ ID NO:B as defined in column 6 of Table 1B. Polynucleotides encoding a polypeptide comprising, or alternatively consisting of the polypeptide sequence of SEQ ID NO:Y, a polypeptide encoded by SEQ ID NO:X, a polypeptide encoded by the cDNA contained in Clone ID NO:Z, and/or a polypeptide sequence encoded by a nucleotide sequence in SEQ ID NO:B as defined in colunm 6 of Table 1B are also encompassed by the invention. The present invention further encompasses a polynucleotide comprising, or alternatively consisting of, the complement of the nucleic acid sequence of SEQ ID NO:X, a nucleic acid sequence encoding a polypeptide encoded by the complement of the nucleic acid sequence of SEQ ID NO:X, and/or the cDNA contained in Clone ID NO:Z.

[0083] Moreover, representative examples of polynucleotides of the invention comprise, or alternatively consist of, one, two, three, four, five, six, seven, eight, nine, ten, or more of the sequences delineated in Table 1B column 6, or any combination thereof. Additional, representative examples of polynucleotides of the invention comprise, or alternatively consist of, one, two, three, four, five, six, seven, eight, nine, ten, or more of the complementary strand(s) of the sequences delineated in Table 1B column 6, or any combination thereof. In further embodiments, the above-described polynucleotides of the invention comprise, or alternatively consist of, sequences delineated in Table 1B, column 6, and have a nucleic acid sequence which is different from that of the BAC fragment having the sequence disclosed in SEQ ID NO:B (see Table 1B, column 5). In additional embodiments, the above-described polynucleotides of the invention comprise, or alternatively consist of, sequences delineated in Table 1B, column 6, and have a nucleic acid sequence which is different from that published for the BAC clone identified as BAC ID NO:A (see Table 1B, column 4). In additional embodiments, the above-described polynucleotides of the invention comprise, or alternatively consist of, sequences delineated in Table 1B, column 6, and have a nucleic acid sequence which is different from that contained in the BAC clone identified as BAC ID NO:A (see Table 1B, column 4). Polypeptides encoded by these polynucleotides, other polynucleotides that encode these polypeptides, and antibodies that bind these polypeptides are also encompassed by the invention. Additionally, fragments and variants of the above-described polynucleotides and polypeptides are also encompassed by the invention.

[0084] Further, representative examples of polynucleotides of the invention comprise, or alternatively consist of, one, two, three, four, five, six, seven, eight, nine, ten, or more of the sequences delineated in column 6 of Table 1B which correspond to the same Clone ID NO:Z (see Table 1B, column 1), or any combination thereof. Additional, representative examples of polynucleotides of the invention comprise, or alternatively consist of, one, two, three, four, five, six, seven, eight, nine, ten, or more of the complementary strand(s) of the sequences delineated in column 6 of Table 1B which correspond to the same Clone ID NO:Z (see Table 1B, column 1), or any combination thereof. In further embodiments, the above-described polynucleotides of the invention comprise, or alternatively consist of, sequences delineated in column 6 of Table 1B which correspond to the same Clone ID NO:Z (see Table 1B, column 1) and have a nucleic acid sequence which is different from that of the BAC fragment having the sequence disclosed in SEQ ID NO:B (see Table 1B, column 5). In additional embodiments, the above-described polynucleotides of the invention comprise, or alternatively consist of, sequences delineated in column 6 of Table lB which correspond to the same Clone ID NO:Z (see Table 1B, column 1) and have a nucleic acid sequence which is different from that published for the BAC clone identified as BAC ID NO:A (see Table 1B, column 4). In additional embodiments, the above-described polynucleotides of the invention comprise, or alternatively consist of, sequences delineated in column 6 of Table 1B which correspond to the same Clone ID NO:Z (see Table 1B, column 1) and have a nucleic acid sequence which is different from that contained in the BAC clone identified as BAC ID NO:A (see Table 1B, column 4). Polypeptides encoded by these polynucleotides, other polynucleotides that encode these polypeptides, and antibodies that bind these polypeptides are also encompassed by the invention. Additionally, fragments and variants of the above-described polynucleotides and polypeptides are also encompassed by the invention.

[0085] Further, representative examples of polynucleotides of the invention comprise, or alternatively consist of, one, two, three, four, five, six, seven, eight, nine, ten, or more of the sequences delineated in column 6 of Table 1B which correspond to the same contig sequence identifer SEQ ID NO:X (see Table 1B, column 2), or any combination thereof. Additional, representative examples of polynucleotides of the invention comprise, or alternatively consist of, one, two, three, four, five, six, seven, eight, nine, ten, or more of the complementary strand(s) of the sequences delineated in column 6 of Table 1B which correspond to the same contig sequence identifer SEQ ID NO:X (see Table 1B, column 2), or any combination thereof. In further embodiments, the above-described polynucleotides of the invention comprise, or alternatively consist of, sequences delineated in column 6 of Table 1B which correspond to the same contig sequence identifer SEQ ID NO:X (see Table 1B, column 2) and have a nucleic acid sequence which is different from that of the BAC fragment having the sequence disclosed in SEQ ID NO:B (see Table 1B, column 5). In additional embodiments, the above-described polynucleotides of the invention comprise, or alternatively consist of, sequences delineated in column 6 of Table 1B which correspond to the same contig sequence identifer SEQ ID NO:X (see Table 1B, column 2) and have a nucleic acid sequence which is different from that published for the BAC clone identified as BAC ID NO:A (see Table 1B, column 4). In additional embodiments, the above-described polynucleotides of the invention comprise, or alternatively consist of, sequences delineated in column 6 of Table 1B which correspond to the same contig sequence identifer SEQ ID NO:X (see Table 1B, column 2) and have a nucleic acid sequence which is different from that contained in the BAC clone identified as BAC ID NO:A (See Table 1B, column 4). Polypeptides encoded by these polynucleotides, other polynucleotides that encode these polypeptides, and antibodies that bind these polypeptides are also encompassed by the invention. Additionally, fragments and variants of the above-described polynucleotides and polypeptides are also encompassed by the invention.

[0086] Moreover, representative examples of polynucleotides of the invention comprise, or alternatively consist of, one, two, three, four, five, six, seven, eight, nine, ten, or more of the sequences delineated in the same row of Table 1B column 6, or any combination thereof. Additional, representative examples of polynucleotides of the invention comprise, or alternatively consist of, one, two, three, four, five, six, seven, eight, nine, ten, or more of the complementary strand(s) of the sequences delineated in the same row of Table 1B column 6, or any combination thereof. In preferred embodiments, the polynucleotides of the invention comprise, or alternatively consist of, one, two, three, four, five, six, seven, eight, nine, ten, or more of the complementary strand(s) of the sequences delineated in the same row of Table 1B column 6, wherein sequentially delineated sequences in the table (i.e. corresponding to those exons located closest to each other) are directly contiguous in a 5′ to 3′ orientation. In further embodiments, above-described polynucleotides of the invention comprise, or alternatively consist of, sequences delineated in the same row of Table 1B, column 6, and have a nucleic acid sequence which is different from that of the BAC fragment having the sequence disclosed in SEQ ID NO:B (see Table 1B, column 5). In additional embodiments, the above-described polynucleotides of the invention comprise, or alternatively consist of, sequences delineated in the same row of Table 1B, column 6, and have a nucleic acid sequence which is different from that published for the BAC clone identified as BAC ID NO:A (see Table 1B, column 4). In additional embodiments, the above-described polynucleotides of the invention comprise, or alternatively consist of, sequences delineated in the same row of Table 1B, column 6, and have a nucleic acid sequence which is different from that contained in the BAC clone identified as BAC ID NO:A (see Table 1B, column 4). Polypeptides encoded by these polynucleotides, other polynucleotides that encode these polypeptides, and antibodies that bind these polypeptides are also encompassed by the invention.

[0087] In additional specific embodiments, polynucleotides of the invention comprise, or alternatively consist of, one, two, three, four, five, six, seven, eight, nine, ten, or more of the sequences delineated in column 6 of Table 1B, and the polynucleotide sequence of SEQ ID NO:X (e.g., as defined in Table 1B, column 2) or fragments or variants thereof. Polypeptides encoded by these polynucleotides, other polynucleotides that encode these polypeptides, and antibodies that bind these polypeptides are also encompassed by the invention.

[0088] In additional specific embodiments, polynucleotides of the invention comprise, or alternatively consist of, one, two, three, four, five, six, seven, eight, nine, ten, or more of the sequences delineated in column 6 of Table 1B which correspond to the same Clone ID NO:Z (see Table 1B, column 1), and the polynucleotide sequence of SEQ ID NO:X (e.g., as defined in Table 1A or 1B) or fragments or variants thereof. In preferred embodiments, the delineated sequence(s) and polynucleotide sequence of SEQ ID NO:X correspond to the same Clone ID NO:Z. Polypeptides encoded by these polynucleotides, other polynucleotides that encode these polypeptides, and antibodies that bind these polypeptides are also encompassed by the invention.

[0089] In further specific embodiments, polynucleotides of the invention comprise, or alternatively consist of, one, two, three, four, five, six, seven, eight, nine, ten, or more of the sequences delineated in the same row of column 6 of Table 1B, and the polynucleotide sequence of SEQ ID NO:X (e.g., as defined in Table 1A or 1B) or fragments or variants thereof. In preferred embodiments, the delineated sequence(s) and polynucleotide sequence of SEQ ID NO:X correspond to the same row of column 6 of Table 1B. Polypeptides encoded by these polynucleotides, other polynucleotides that encode these polypeptides, and antibodies that bind these polypeptides are also encompassed by the invention.

[0090] In additional specific embodiments, polynucleotides of the invention comprise, or alternatively consist of a polynucleotide sequence in which the 3′ 10 polynucleotides of one of the sequences delineated in column 6 of Table 1B and the 5′ 10 polynucleotides of the sequence of SEQ ID NO:X are directly contiguous. Nucleic acids which hybridize to the complement of these 20 contiguous polynucleotides under stringent hybridization conditions or alternatively, under lower stringency conditions, are also encompassed by the invention. Polypeptides encoded by these polynucleotides and/or nucleic acids, other polynucleotides and/or nucleic acids that encode these polypeptides, and antibodies that bind these polypeptides are also encompassed by the invention. Additionally, fragments and variants of the above-described polynucleotides, nucleic acids, and polypeptides are also encompassed by the invention.

[0091] In additional specific embodiments, polynucleotides of the invention comprise, or alternatively consist of, a polynucleotide sequence in which the 3′ 10 polynucleotides of one of the sequences delineated in column 6 of Table 1B and the 5′ 10 polynucleotides of a fragment or variant of the sequence of SEQ ID NO:X are directly contiguous Nucleic acids which hybridize to the complement of these 20 contiguous polynucleotides under stringent hybridization conditions or alternatively, under lower stringency conditions, are also encompassed by the invention. Polypeptides encoded by these polynucleotides and/or nucleic acids, other polynucleotides and/or nucleic acids encoding these polypeptides, and antibodies that bind these polypeptides are also encompassed by the invention. Additionally, fragments and variants of the above-described polynucleotides, nucleic acids, and polypeptides are also encompassed by the invention.

[0092] In specific embodiments, polynucleotides of the invention comprise, or alternatively consist of, a polynucleotide sequence in which the 3′ 10 polynucleotides of the sequence of SEQ ID NO:X and the 5′ 10 polynucleotides of the sequence of one of the sequences delineated in column 6 of Table 1B are directly contiguous. Nucleic acids which hybridize to the complement of these 20 contiguous polynucleotides under stringent hybridization conditions or alternatively, under lower stringency conditions, are also encompassed by the invention. Polypeptides encoded by these polynucleotides and/or nucleic acids, other polynucleotides and/or nucleic acids encoding these polypeptides, and antibodies that bind these polypeptides are also encompassed by the invention. Additionally, fragments and variants of the above-described polynucleotides, nucleic acids, and polypeptides are also encompassed by the invention.

[0093] In specific embodiments, polynucleotides of the invention comprise, or alternatively consist of, a polynucleotide sequence in which the 3′ 10 polynucleotides of a fragment or variant of the sequence of SEQ ID NO:X and the 5′ 10 polynucleotides of the sequence of one of the sequences delineated in column 6 of Table 1B are directly contiguous. Nucleic acids which hybridize to the complement of these 20 contiguous polynucleotides under stringent hybridization conditions or alternatively, under lower stringency conditions, are also encompassed by the invention. Polypeptides encoded by these polynucleotides and/or nucleic acids, other polynucleotides and/or nucleic acids encoding these polypeptides, and antibodies that bind these polypeptides are also encompassed by the invention. Additionally, fragments and variants of the above-described polynucleotides, nucleic acids, and polypeptides, are also encompassed by the invention.

[0094] In further specific embodiments, polynucleotides of the invention comprise, or alternatively consist of, a polynucleotide sequence in which the 3′ 10 polynucleotides of one of the sequences delineated in column 6 of Table 1B and the 5′ 10 polynucleotides of another sequence in column 6 are directly contiguous. Nucleic acids which hybridize to the complement of these 20 contiguous polynucleotides under stringent hybridization conditions or alternatively, under lower stringency conditions, are also encompassed by the invention. Polypeptides encoded by these polynucleotides and/or nucleic acids, other polynucleotides and/or nucleic acids encoding these polypeptides, and antibodies that bind these polypeptides are also encompassed by the invention. Additionally, fragments and variants of the above-described polynucleotides, nucleic acids, and polypeptides are also encompassed by the invention.

[0095] In specific embodiments, polynucleotides of the invention comprise, or alternatively consist of, a polynucleotide sequence in which the 3′ 10 polynucleotides of one of the sequences delineated in column 6 of Table 1B and the 5′ 10 polynucleotides of another sequence in column 6 corresponding to the same Clone ID NO:Z (see Table 1B, column 1) are directly contiguous. Nucleic acids which hybridize to the complement of these 20 lower stringency conditions, are also encompassed by the invention. Polypeptides encoded by these polynucleotides and/or nucteic acids, other polynucleotides and/or nucleic acids encoding these polypeptides, and antibodies that bind these polypeptides are also encompassed by the invention. Additionally, fragments and variants of the above-described polynucleotides, nucleic acids, and polypeptides are also encompassed by the invention.

[0096] In specific embodiments, polynucleotides of the invention comprise, or alternatively consist of, a polynucleotide sequence in which the 3′ 10 polynucleotides of one sequence in column 6 corresponding to the same contig sequence identifer SEQ ID NO:X (see Table 1B, column 2) are directly contiguous. Nucleic acids which hybridize to the complement of these 20 contiguous polynucleotides under stringent hybridization conditions or alternatively, under lower stringency conditions, are also encompassed by the invention. Polypeptides encoded by these polynucleotides and/or nucleic acids, other polynucleotides and/or nucleic acids encoding these polypeptides, and antibodies that bind these polypeptides are also encompassed by the invention. Additionally, fragments and variants of the above-described polynucleotides, nucleic acids, and polypeptides are also encompassed by the invention.

[0097] In specific embodiments, polynucleotides of the invention comprise, or alternatively consist of a polynucleotide sequence in which the 3′ 10 polynucleotides of one of the sequences delineated in column 6 of Table 1B and the 5′ 10 polynucleotides of another sequence in column 6 corresponding to the same row are directly contiguous. In preferred embodiments, the 3′ 10 polynucleotides of one of the sequences delineated in column 6 of Table 1B is directly contiguous with the 5′ 10 polynucleotides of the next sequential exon delineated in Table 1B, column 6. Nucleic acids which hybridize to the complement of these 20 contiguous polynucleotides under stringent hybridization conditions or alternatively, under lower stringency conditions, are also encompassed by the invention. Polypeptides encoded by these polynucleotides and/or nucleic acids, other polynucleotides and/or nucleic acids encoding these polypeptides, and antibodies that bind these polypeptides are also encompassed by the invention. Additionally, fragments and variants of the above-described polynucleotides, nucleic acids, and polypeptides are also encompassed by the invention.

[0098] Many polynucleotide sequences, such as EST sequences, are publicly available and accessible through sequence databases and may have been publicly available prior to conception of the present invention. Preferably, such related polynucleotides are specifically excluded from the scope of the present invention. Accordingly, for each contig sequence (SEQ ID NO:X) listed in the fourth column of Table 1A, preferably excluded are one or more polynucleotides comprising a nucleotide sequence described by the general formula of a-b, where a is any integer between 1 and the final nucleotide minus 15 of SEQ ID NO:X, b is an integer of 15 to the final nucleotide of SEQ ID NO:X, where both a and b correspond to the positions of nucleotide residues shown in SEQ ID NO:X, and where b is greater than or equal to a +14. More specifically, preferably excluded are one or more polynucleotides comprising a nucleotide sequence described by the general formula of a-b, where a and b are integers as defined in columns 4 and 5, respectively, of Table 3. In specific embodiments, the polynucleotides of the invention do not consist of at least one, two, three, four, five, ten, or more of the specific polynucleotide sequences referenced by the Genbank Accession No. as disclosed in column 6 of Table 3 (including for example, published sequence in connection with a particular BAC clone). In further embodiments, preferably excluded from the invention are the specific polynucleotide sequence(s) contained in the clones corresponding to at least one, two, three, four, five, ten, or more of the available material having the accession numbers identified in the sixth column of this Table (including for example, the actual sequence contained in an identified BAC clone). In no way is this listing meant to encompass all of the sequences which may be excluded by the general formula, it is just a representative example. All references available through these accessions are hereby incorporated by reference in their entirety.

TABLE 3

| | SEQ | | | | |
|---|---|---|---|---|---|
| | ID | | | | |
| Clone ID | NO: | Contig | EST Disclaimer | | |
| NO: Z | X | ID: | Range of a | Range of b | Accession #'s |
| HCHBA22 | 11 | 1103891 | 1-751 | 15-765 | |
| HEEAA77 | 12 | 1227542 | 1-1619 | 15-1633 | |
| HDAAV32 | 13 | 714803 | 1-432 | 15-446 | AL039222, AL039260, AW028321, |
| | | | | | AA082113, D31154, AI751781, F00943, |
| | | | | | AW407575, AA309630, D30982, D56449, |
| | | | | | T82358, AI016162, AA593822, N87871, |
| | | | | | AA285238, AA180265, AA191753, |
| | | | | | D83827, C06254, D83875, AA112114, |
| | | | | | AB020692, X52311, AL096773, |
| | | | | | AF070542, and AF077054. |
| HTLGM07 | 14 | 1158948 | 1-1242 | 15-1256 | |
| HTLHC14 | 15 | 908428 | 1-752 | 15-766 | AI738485, AI738586, AF096834, |
| | | | | | AC003688, AF073955, and AF073954. |
| HAFBC92 | 16 | 1150863 | 1-484 | 15-498 | |
| HAPOI92 | 17 | 785576 | 1-531 | 15-545 | AA155839, AA085882, AI888513, |
| | | | | | AW302871, AW182180, AA188322, |
| | | | | | AI828876, H22733, H44710, AI609275, |
| | | | | | AA320171, AA358978, H43646, |
| | | | | | AA622251, AA366689, AI560190, |
| | | | | | AI525519, T31557, AA583210, T05149, |
| | | | | | AW378895, AF044286, M99065, |
| | | | | | AF054174, AF041483, AF058445, and |
| | | | | | AF171081. |
| HAVNO06 | 18 | 1151375 | 1-203 | 15-217 | |
| HBAGY72 | 19 | 859099 | 1-220 | 15-234 | AA494328, AA934603, AA853509, |
| | | | | | AI922810, AI702064, AI499576, |
| | | | | | AA035560, AI340855, AI275701, |
| | | | | | AI623815, AA635666, AA846644, |
| | | | | | AI355407, AI754889, AI685700, |
| | | | | | AW025581, AA595023, AI342634, |
| | | | | | AA041522, R45111, AI475369, AA226649, |
| | | | | | AI702045, R42582, AI433483, AA854692, |
| | | | | | AW245259, AI089942, AI022966, |
| | | | | | AI187408, AI091679, AI635968, |
| | | | | | AA603430, AI014396, AI376896, |
| | | | | | AI673711, AW080446, R37242, |
| | | | | | AW188445, W70021, AW438841, |
| | | | | | AA564158, AW245395, AW082882, |
| | | | | | AA622027, AI371000, AI817199, R58895, |
| | | | | | AA291213, AA630581, AI028010, |
| | | | | | AI247122, AA912276, AI913912, |
| | | | | | AA455725, AI382278, AI140087, |
| | | | | | AI539147, AA653092, AI619598, T23934, |
| | | | | | AI274683, AA996376, AA340448, |
| | | | | | AI702392, AI264576, AW102956, H91309, |
| | | | | | AW247822, AI289955, AI921927, |
| | | | | | AI304645, AA890551, AA973661, |
| | | | | | AA595308, AI274659, AI567635, N91976, |
| | | | | | F02801, AA834866, AI1250444, AI039270, |
| | | | | | AA991275, AA987484, R05318, |
| | | | | | AW194080, N34850, AW130638, |
| | | | | | AA894875, AA618067, AA877890, |
| | | | | | AW118283, AI346362, AI635885, |
| | | | | | AA612888, AW337459, AA838774, |
| | | | | | AI784537, AI093049, AI368898, |
| | | | | | AAI29827, N93031, AA028898, F01350, |
| | | | | | N90161, AI937174, AI983577, AA771987, |
| | | | | | W32437, AW130071, AI057417, |
| | | | | | AI862871, AA947271, AA227911, |
| | | | | | AI061258, T93076, N95223, AI123224, |
| | | | | | AI354754, AA911083, AI027683, |
| | | | | | AI865726, AI744867, AW043959, |
| | | | | | AI582447, AA029023, AI589603, |
| | | | | | AI811721, AA025020, AI434254, |
| | | | | | AI028464, AW188412, AW275836, |
| | | | | | AI986105, AW075283, AI347935, |
| | | | | | AI572997, N32330, N74030, AI493745, |
| | | | | | AW247181, N34846, AA777539, W46373, |
| | | | | | AI193128, AA923542, AA033734, |
| | | | | | AI274816, AI436338, AW130786, |
| | | | | | AW189480, AI421813, AI826792, |
| | | | | | AW152468, AI692812, AI569165, |
| | | | | | AW162109, AA373255, AA204794, |
| | | | | | AI697403, N93432, AI819491, AA595060, |
| | | | | | T62230, AI831752, N26686, AA622191, |
| | | | | | AA603574, AI768173, AI262844, W87004, |
| | | | | | AW027153, AA917745, AI281891, |
| | | | | | AI445268, AA313912, AA057160, |
| | | | | | AA569997, AI628289, AA035291, |
| | | | | | AA702460, AI088535, AW073102, |
| | | | | | D20254, AI721243, AI560758, AI697834, |
| | | | | | N23611, N93855, AA976872, AI762461, |
| | | | | | AI627866, AA227612, AI124096, |
| | | | | | AI362537, AI364942, H22942, AA737611, |
| | | | | | AA858042, AI303014, AW195943, |
| | | | | | AA327520, W87477, AW393392, |
| | | | | | AA039878, AI610362, AA641818, Z99428, |
| | | | | | AI432656, AW172745, AI587156, |
| | | | | | AI628850, M923989, AL046849, |
| | | | | | AI824375, AI969655, AL045500, |
| | | | | | AI537677, AL047675, AI345477, |
| | | | | | AI950892, AL042787, AI890907, |
| | | | | | AI524671, AW268122, AI815232, |
| | | | | | AW372903, AI620284, AI446538, |
| | | | | | AI859991, AA225339, AI872423, |
| | | | | | AI886415, AI433157, AA470491, |
| | | | | | AI539771, AW163834, AI500659, |
| | | | | | AI798456, AI500523, AL079963, |
| | | | | | AI241923, AI432666, AI269862, |
| | | | | | AI824576, AW162194, D31767, I48979, |
| | | | | | AL122110, AL117460, AL110280, I48978, |
| | | | | | I89947, AFI13699, AL122118, AJ000937, |
| | | | | | AL133640, AL122049, AL050116, |
| | | | | | A77033, A77035, AF085348, AL050172, |
| | | | | | AL137527, AL133113, X70685, |
| | | | | | AL049382, AL137550, AL117435, |
| | | | | | AL137557, A08916, AR011880, E02349, |
| | | | | | AF111851, Y16645, U49908, AR038854, |
| | | | | | AF090900, AF090934, I33392, AL133557, |
| | | | | | AF177401, AF106862, AL049283, Y11254, |
| | | | | | U67958, AL122050, AL137459, |
| | | | | | AL117432, I89931, AL110197, AF090903, |
| | | | | | A08913, S68736, X84990, AF032666, |
| | | | | | AF026816, AL049938, AL049314, |
| | | | | | AF111849, AL137533, AF090901, |
| | | | | | AL050393, AL133560, AF100931, I03321, |
| | | | | | AL133016, AF125948, U42766, AF104032, |
| | | | | | AF113677, AF090943, AL110196, |
| | | | | | AF087943, XF132676, AF061836, Z82022, |
| | | | | | AF153205, AL096744, AL050277, |
| | | | | | AF113694, AF118094, AL050149, X96540, |
| | | | | | AF113019, AL133080, A08910, AL133075, |
| | | | | | S78214, A08909, AL133072, AF057300, |
| | | | | | AF057299, E12747, AL110221, I49625, |
| | | | | | AL050146, U35846, X63574, AC007172, |
| | | | | | AF146568, AF090896, AF126247, |
| | | | | | AL137526, AL049452, AL117585, |
| | | | | | Y09972, AF081195, A08912, AL133081, |
| | | | | | AJ238278, I09499, AL137488, AF113013, |
| | | | | | E07361, S61953, AF078844, AF097996, |
| | | | | | E05822, AF079763, AL137538, AL117457, |
| | | | | | Y07905, AF139986, AL133565, AF091084, |
| | | | | | AF113690, AL050024, AR000496, |
| | | | | | U39656, AF079765, AF081197, AL080159, |
| | | | | | Y14314, U00763, AL133077, AL050108, |
| | | | | | AL080074, AL049464, X72889, AF003737, |
| | | | | | AR059958, AF017152, E07108, A07647, |
| | | | | | AF125949, AF158248, AL122121, |
| | | | | | AL080124, AI8788, A93016, AB019565, |
| | | | | | AL133067, AR038969, X82434, Y11587, |
| | | | | | AL049430, L31396, AL110225, AB007812, |
| | | | | | U78525, AF113691, AL133606, L31397, |
| | | | | | A58524, A58523, AF017437, AF118064, |
| | | | | | AL049466, AL137478, U58996, |
| | | | | | AL117583, AF183393, AF026124, |
| | | | | | AF061795, AF151685, AL122093, |
| | | | | | AL050092, A03736, AL137521, AF061573, |
| | | | | | AL137292, AR013797, E03348, L19437, |
| | | | | | E04233, AL137271, Z37987, AIF185576, |
| | | | | | U80742, AJ012755, AF061943, AL080060, |
| | | | | | Z72491, AF031147, AF113676, AL117394, |
| | | | | | AI2297, AL137480, U72620, AL122123, |
| | | | | | A21103, X63410, AF113689, AL133093, |
| | | | | | AF118070, AL133665, AL110222, |
| | | | | | AL080137, X98834, X81464, AC004837, |
| | | | | | A65341, E06743, A90832, AJ242859, |
| | | | | | AL137529, AJ003118, AL050138, X87582, |
| | | | | | A93350, AL023657, AF162270, AF061981, |
| | | | | | I00734, AL137463, AF111112, AR020905, |
| | | | | | AL049300, AF067728, AL137560, |
| | | | | | AF210052, E00617, E00717, E00778, |
| | | | | | U91329, AF008439, X83508, I68732, |
| | | | | | AL137476, S75997, AL133104, I09360, |
| | | | | | X62580, AF051325, M30514, AL137648, |
| | | | | | AL133098, U68387, E02221, AJ006417, |
| | | | | | AF119337, AL137429, AC011953, |
| | | | | | AC027300, AC023881, and AC023881. |
| HBGMF11 | 20 | 1127815 | 1-730 | 115-744 | |
| HBGQQ95 | 21 | 1151377 | 1-486 | 15-500 | |
| HBNAY35 | 22 | 1123262 | 1-1809 | 15-1823 | |
| HCFCJ21 | 23 | 1010566 | 1-179 | 15-193 | |
| HCRMZ59 | 24 | 922431 | 1-251 | 15-265 | AA831693, R49192, AI016727, AA766473, |
| | | | | | AI889159, AW270775, AW020482, |
| | | | | | AA634065, AA657951, AA588713, |
| | | | | | AA506072, AA970437, AA493425, |
| | | | | | AI521391, AA836258, AA747365, |
| | | | | | AA843268, AA877320, W52605, |
| | | | | | AI565600, AI915500, R41922, AI984487, |
| | | | | | AI078153, AI242873, AW118523, |
| | | | | | AA836897, AW057867, F30359, |
| | | | | | AA866147, AA884061, AI352533, F04258, |
| | | | | | AA878922, AI220750, AW029615, |
| | | | | | AI283314, T17137, AW089886, |
| | | | | | AA935739, AI811154, AI880499, |
| | | | | | AI088394, AAI02845, AW009649, |
| | | | | | AI983181, AA864283, AI219448, W67270, |
| | | | | | AI582488, AI956149, AA932061, |
| | | | | | AI215898, AI672843, AA075389, |
| | | | | | AA694204, AI269018, AA702134, |
| | | | | | AI096370, AA777776, AI805610, |
| | | | | | AI587617, AW262869, AI719667, |
| | | | | | AI744378, AI818185, AI922084, |
| | | | | | AI744359, AI161347, AI351161, |
| | | | | | AA779373, AAI73198, F36548, R91226, |
| | | | | | AW103948, T34555, AI880743, |
| | | | | | AA502924, R08021, AA075325, |
| | | | | | AA873804, T62180, H43268, AI749570, |
| | | | | | AI936256, AA744991, AI624279, |
| | | | | | AW058156, AW166464, AW104724, |
| | | | | | AA608572, C16207, AW075351, |
| | | | | | AL045903, AI434223, AI608936, |
| | | | | | AI537677, AW262565, AI491852, |
| | | | | | AI280747, AI862142, AW150578, |
| | | | | | AA470491, AW087445, AI612913, |
| | | | | | AI269862, AL045266, N42321, AL040243, |
| | | | | | AL039086, AI270707, AI475371, |
| | | | | | AI634224, AI571909, AI097410, |
| | | | | | AL043326, AW071417, AI564719, |
| | | | | | AI801544, AI554818, AW071349, |
| | | | | | AI802542, AW301505, AI570989, |
| | | | | | AI799183, AI499463, AI275175, |
| | | | | | AW170635, AI499263, AI610402, |
| | | | | | AL036403, AW148716, AI433976, |
| | | | | | AW090013, AI269205, AI620284, |
| | | | | | AI811344, AI637584, AI500706, |
| | | | | | AW132056, AL045500, AL048871, |
| | | | | | AI433157, AI043981, AI890833, |
| | | | | | AI926790, AI815232, AI539771, |
| | | | | | AI784252, AI619502, AL041573, |
| | | | | | AW129659, AI569583, AI500659, |
| | | | | | AW026882, AI500523, AA225339, |
| | | | | | AI491776, AI702073, AI254731, |
| | | | | | AL079963, AI866457, AI702068, |
| | | | | | AW301409, AL039276, AI318280, |
| | | | | | AI612885, AI801766, AI648509, |
| | | | | | AL134259, AI682743, AI559296, |
| | | | | | AL119791, AI815855, AI536638, |
| | | | | | AI499131, AI273048, AL043975, |
| | | | | | AI624206, AI536685, AI524671, |
| | | | | | AL121270, AI702406, AI445237, |
| | | | | | AI677796, AI696612, AI349598, |
| | | | | | AL036146, AI889376, AL036361, |
| | | | | | AI520862, AI921248, AI349004, |
| | | | | | AI1862144, AI922901, AI758437, C00032, |
| | | | | | AL036980, AI335449, AI064830, |
| | | | | | AI560099, AI520785, AI281837, |
| | | | | | AI857296, AI247193, AI591316, |
| | | | | | AI554427, AI564247, AA508692, |
| | | | | | AI445025, AI340582, AI868831, |
| | | | | | AL038605, AI349645, AI538716, |
| | | | | | AI439745, AI590120, AW198090, |
| | | | | | AI801322, AL039783, AL036802, |
| | | | | | AW169653, AI648684, AW117882, |
| | | | | | AW074993, AI610756, AI567993, |
| | | | | | AI525669, AI348897, AI270055, |
| | | | | | AI872711, AW302973, AI274508, |
| | | | | | AI572787, AW268060, AW169671, |
| | | | | | AI818977, AI312428, AW274192, |
| | | | | | AI800453, AW268220, AI866608, |
| | | | | | AI568855, AI554245, AW151138, |
| | | | | | AI362637, AL121328, AI432969, |
| | | | | | AL135661, AI281779, AF119665, |
| | | | | | AB026723, AF154065, AR061907, I48979, |
| | | | | | I89947, I48978, AF111851, AL050393, |
| | | | | | AL049314, S68736, AF113694, AF113019, |
| | | | | | AL096744, AL110221, AL050277, |
| | | | | | AL137459, AF090900, AL122121, I89931, |
| | | | | | AL122050, AL117457, AL133080, |
| | | | | | AF118064, AL137557, AL050149, Y11587, |
| | | | | | A08916, AF113677, A08913, AF113013, |
| | | | | | Y11254, AF017152, AL133016, AF078844, |
| | | | | | AF113690, AL080124, AF125949, |
| | | | | | AF177401, AF090901, X82434, E07361, |
| | | | | | AL133075, AF158248, AL122093, |
| | | | | | AL050138, AF017437, AL049938, S78214, |
| | | | | | AF090903, AL049452, AF146568, Y16645, |
| | | | | | AJ242859, AF091084, AF090934, |
| | | | | | AL133640, AL117460, AF125948, U42766, |
| | | | | | AL133565, AL122123, L31396, L31397, |
| | | | | | AF104032, AF113691, AF090943, |
| | | | | | AL133557, AB019565, AF113676, E03348, |
| | | | | | AF113689, AL110196, AR059958, |
| | | | | | AF118070, AF067728, X84990, AL050146, |
| | | | | | AL133606, X63574, AL133093, AF113699, |
| | | | | | AL117394, A93016, AJ000937, AL050116, |
| | | | | | AL050108, AL080060, AF090896, A65341, |
| | | | | | AL049466, AL050137, AL137527, |
| | | | | | AF106862, AL137550, AL049382, |
| | | | | | AL133560, AR011880, AL137283, |
| | | | | | U91329, AL110225, E02349, AL117585, |
| | | | | | AF097996, AP079765, AL122098, E07108, |
| | | | | | A58524, A58523, AL049464, AJ238278, |
| | | | | | I49625, U35846, AL049300, AC002464, |
| | | | | | AL117435, AL117583, A77033, A77035, |
| | | | | | Z82022, X72889, A08910, AP000130, |
| | | | | | AP000208, AC004686, AF183393, |
| | | | | | AL133113, U00763, A03736, A08912, |
| | | | | | AL022147, AL132985, AL137538, |
| | | | | | AF118094, 133392, AC004987, AL049430, |
| | | | | | AL122110, AF042090, AC006059, |
| | | | | | X65873, AP000247, AL050024, AL137463, |
| | | | | | L78810, A08909, AC006336, AF110520, |
| | | | | | X96540, AC004594, AC006371, I03321, |
| | | | | | X70685, AL137271, AL137648, AI2297, |
| | | | | | AF061943, AC007390, AC007298, |
| | | | | | AL049776, AL121603, AP000344, |
| | | | | | AL022165, AC006112, AL035587, |
| | | | | | AL021393, AC006039, AF000145, |
| | | | | | AC007172, AC004813, X93495, |
| | | | | | AL080127, U80742, Z98036, AC002480, |
| | | | | | AF087943, AC004883, AL133568, |
| | | | | | AC005048, X98 834, AC005094, |
| | | | | | AL049283, AL080159, AC004213, |
| | | | | | AC004989, AC005488, AL133072, |
| | | | | | AC004383, AC008067, AL137521, |
| | | | | | AC006160, U72620, AC005291, |
| | | | | | AC009501, AC011953, AC027300, |
| | | | | | AC010694, AC010694, AC022231, |
| | | | | | AL359092, AC009453, AC048342, |
| | | | | | AC048342, AP001451, AC022232, and |
| | | | | | AC025036. |
| HCRNM87 | 25 | 951839 | 1-318 | 15-332 | AI910713, R42070, AW003035, AI793046, |
| | | | | | AI653141, AA402495, AI769220, |
| | | | | | AI440526, AI280082, AI263023, |
| | | | | | AI680237, AW136904, AI359977, |
| | | | | | AI269309, AA405739, AA576608, |
| | | | | | AA513373, AI654888, AI609921, W95226, |
| | | | | | AI139078, AA933769, AI761067, |
| | | | | | AW023685, AW009454, AW299728, |
| | | | | | AW149440, AA405990, AA309655, |
| | | | | | AI762571, AI440034, AI361426, |
| | | | | | AI000653, AA535028, AA911081, |
| | | | | | AA868332, AI203844, AI499146, |
| | | | | | AL041862, AL046356, AL047675, |
| | | | | | AL042745, AL047092, AL045891, |
| | | | | | AL119748, AI866798, AL079977, |
| | | | | | AI537273, AI799195, AI432666, |
| | | | | | AL042628, AI273142, AI250852, |
| | | | | | AL045774, AI431424, AI436429, |
| | | | | | AW131308, AI627988, AL042744, |
| | | | | | AL046926, AL045620, AL042787, |
| | | | | | AI371228, AL040243, AW089664, |
| | | | | | AW149227, AI610557, AL045266, |
| | | | | | AL040207, AI800433, AI570781, |
| | | | | | AI433976, AL045500, AI433157, |
| | | | | | AL042488, AW151136, AI539771, |
| | | | | | AI537677, AI494201, AI500659, |
| | | | | | AI554821, AI815232, AI801325, |
| | | | | | AI500523, AL042538, AI582932, |
| | | | | | AI284517, AI923989, AI500706, |
| | | | | | AI445237, AI491776, AW151138, |
| | | | | | AI521560, AI889189, AI500662, |
| | | | | | AI284509, AI889168, AI866573, |
| | | | | | AI589267, AI633493, AI434256, |
| | | | | | AI805769, AI888661, AI284513, |
| | | | | | AI681985, AI636445, AI888118, |
| | | | | | AI889147, AI440252, AI610402, |
| | | | | | AI611348, AI366900, AL039276, |
| | | | | | AW148716, AL042551, AW071417, |
| | | | | | AL045163, AW172723, AI572892, |
| | | | | | AL049085, AI887247, AI624548, |
| | | | | | AI625589, AI590423, AI439717, |
| | | | | | AL048323, AW169653, AI800453, |
| | | | | | AW105601, AI567612, AI445165, |
| | | | | | AI269862, AI620284, AI246319, |
| | | | | | AW193134, AL043089, AI869377, |
| | | | | | AI866510, AI279984, AW082113, |
| | | | | | AI564170, AI860003, AI887499, |
| | | | | | AI758735, AI819970, AI590632, |
| | | | | | AL047422, AI537515, AW152469, |
| | | | | | AI073952, H89138, AW059837, AI497733, |
| | | | | | AI679179, AI364788, AI932638, |
| | | | | | AI275175, AI446373, AI500077, |
| | | | | | AW088903, AW089572, AI826225, |
| | | | | | AI811785, AW054931, AI440263, |
| | | | | | AI499463, AW023590, AI432656, |
| | | | | | AI824576, AW089471, AA833760, |
| | | | | | AI916419, AL046990, AI564765, |
| | | | | | AL036980, AW169604, AI829327, |
| | | | | | AI866786, AI918655, AI433384, |
| | | | | | AI610362, AI368868, AA012905, |
| | | | | | AW075413, AI251434, AI859585, |
| | | | | | AI274728, AI963216, AI784252, |
| | | | | | AI440239, AI922901, AI340659, |
| | | | | | AI932794, AW084869, AI334930, |
| | | | | | AW302992, AW074869, AI302910, |
| | | | | | AW268253, AL042627, AI868204, |
| | | | | | AI890806, AA493923, AI680463, |
| | | | | | AI436456, AI306705, AW104162, |
| | | | | | AW078735, AI612885, AI801544, |
| | | | | | AI963846, AI567940, AI817244, |
| | | | | | AW151714, AI612913, AW148970, |
| | | | | | AI349957, AI690426, AI285826, |
| | | | | | AI564247, AW169848, AI863014, |
| | | | | | AI521594, AI499512, AW152024, |
| | | | | | AI889133, AI783861, AI969601, |
| | | | | | AI872423, AI567993, AI049851, |
| | | | | | AI954130, AI955987, AI923046, |
| | | | | | AI679764, AW118237, AI280670, |
| | | | | | AI859991, AW194441, AL040097, |
| | | | | | AI434223, N80094, AI610307, AI610429, |
| | | | | | AI520810, AI433968, AI636268, |
| | | | | | AI446248, AI814087, AL122049, |
| | | | | | AL117585, AI2297, I03321, X96540, |
| | | | | | AF106862, A08916, AL133014, I89947, |
| | | | | | I48978, A08913, I89931, A08910, I49625, |
| | | | | | A08909, Y11587, AF104032, AF153205, |
| | | | | | S61953, AL080074, AL133098, AL049464, |
| | | | | | AL110225, I26207, AF158248, X93495, |
| | | | | | E03348, L31396, U68387, AF146568, |
| | | | | | AL133072, L31397, AF118064, AF118070, |
| | | | | | AL049314, AL137526, A08912, |
| | | | | | AL122110, AF017437, AL133080, |
| | | | | | AL137560, AL133077, E07361, AF111851, |
| | | | | | M30514, AL080127, AL137556, |
| | | | | | AF090943, U58996, AL133557, AF162270, |
| | | | | | AL137463, AL110280, AFI13694, X82434, |
| | | | | | I48979, AL137557, AL122050, AF113676, |
| | | | | | AL133568, U80742, AL133113, U72620, |
| | | | | | AL049466, AF067728, X84990, AL050277, |
| | | | | | X72889, L19437, AL049452, I09360, |
| | | | | | Y11254, A77033, A77035, AL133640, |
| | | | | | AL117583, Z82022, AJ242859, Y14314, |
| | | | | | AL080124, AL137476, AL122123, |
| | | | | | AL050138, AL049300, AR038854, |
| | | | | | AF017152, AL133016, I00734, AF061943, |
| | | | | | U00763, AR038969, AF003737, |
| | | | | | AL133093, AL137550, X70685, A3238278, |
| | | | | | E00617, E00717, E00778, S68736, |
| | | | | | AL117394, AL133565, U91329, AF111112, |
| | | | | | AL080060, AF113689, X87582, U67958, |
| | | | | | AL080159, AR000496, U39656, L30117, |
| | | | | | AR059958, AL137538, AL122098, |
| | | | | | U96683, AL133075, A45787, AL096744, |
| | | | | | AL117440, AL080137, AL137527, |
| | | | | | AF026816, AL122121, A93016, AF026124, |
| | | | | | S78214, E08631, AF125948, AL117435, |
| | | | | | U35846, AL137283, AF118094, A90832, |
| | | | | | AL137459, AL117460, AL117457, |
| | | | | | AL122093, AL137521, A58524, A58523, |
| | | | | | AF113019, AF113699, E15569, AF113691, |
| | | | | | AF113013, AB019565, AF078844, |
| | | | | | AF091084, AL133104, AF113690, |
| | | | | | AF113677, AIF097996, Z72491, I42402, |
| | | | | | AL137648, E07108, AL050149, AL050116, |
| | | | | | AF125949, AL050146, AF090896, X65873, |
| | | | | | U42766, AL133606, AL133560, X63574, |
| | | | | | AF057300, AF057299, AR011880, |
| | | | | | AF119337, AL133067, AF090934, Y16645, |
| | | | | | A65341, E05822, AL050024, E04233, |
| | | | | | AL110196, A3000937, AF087943, |
| | | | | | AL049430, I33392, AL049382, AL137271, |
| | | | | | E02349, AF183393, A93350, AL110221, |
| | | | | | AF090900, AF090903, Y09972, A07647, |
| | | | | | AL050108, AF177401, AF185576, |
| | | | | | AF090901, AL050393, AF079765, A03736, |
| | | | | | AJ012755, X98834, E08263, E08264, |
| | | | | | AF061573, I41145, Z37987, U78525, |
| | | | | | AL137292, AL133049, AL137533, |
| | | | | | AL117432, E02221, A3006417, AL080086, |
| | | | | | AL049938, AL049283, AF051325, |
| | | | | | AL137523, AF079763, AF111849, X92070, |
| | | | | | Y07905, AL050092, AL137480, AF008439, |
| | | | | | AB007812, AL110197, U49908, |
| | | | | | AL050172, X53587, AL137478, AF132676, |
| | | | | | AF061836, AF210052, AL122118, |
| | | | | | AF081197, AL133081, AR054984, |
| | | | | | AR013797, AL137273, AL137294, |
| | | | | | AF100931, X62580, AF067790, AL122111, |
| | | | | | AL080158, AF061795, AF151685, and |
| | | | | | AF106827. |
| HCROG94 | 26 | 1151467 | 1-277 | 15-291 | |
| HDPFZ70 | 27 | 1105004 | 1-626 | 15-640 | |
| HDPWU54 | 28 | 969288 | 1-141 | 15-155 | |
| HDTAA31 | 29 | 1128968 | 1-1442 | 15-1456 | |
| HDTFW91 | 30 | 1151470 | 1-311 | 15-325 | |
| HEQBP52 | 31 | 1151473 | 1-641 | 15-655 | |
| HFKIE07 | 32 | 1219610 | 1-599 | 15-613 | |
| HHAMC07 | 33 | 1151480 | 1-281 | 15-295 | |
| HHBEG80 | 34 | 951688 | 1-430 | 15-444 | AI095759, AI493168, AW206042, |
| | | | | | AI738997, AA921950, AI968444, |
| | | | | | AWI97610, AI079592, AW043953, |
| | | | | | AW242819, AI744109, AI861845, |
| | | | | | AI193079, AI668960, AW182363, |
| | | | | | AI640258, AI092922, AA722466, N21525, |
| | | | | | W73601, AI140933, AA021471, AI720404, |
| | | | | | AA708907, AI123135, F30816, AI366183, |
| | | | | | AI768468, T77057, AI968632, AA045707, |
| | | | | | AA259196, AA127350, H11390, F32206, |
| | | | | | AI767021, H24345, AI418672, AW383731, |
| | | | | | N46355, AA905163, AA018209, F36514, |
| | | | | | AI564847, T83879, F01296, AA070435, |
| | | | | | AA921795, R20767, F00344, AA196850, |
| | | | | | AA311411, AA045706, AI969655, |
| | | | | | AI824576, AI440239, AI633062, |
| | | | | | AI250663, AI613038, AI815855, |
| | | | | | AW193872, AW262565, AL045672, |
| | | | | | AI923989, AI251876, AL119863, |
| | | | | | AW080402, AI568138, AI926878, |
| | | | | | AI590227, AI654037, AI478123, |
| | | | | | AI698391, AI636588, AW161579, |
| | | | | | AW129929, AL042745, AI805603, |
| | | | | | AI890507, AW078800, AW130930, |
| | | | | | AW020419, AI866002, AI537677, |
| | | | | | AI673785, AI306705, AL036403, |
| | | | | | AW051226, AI811785, AI288305, |
| | | | | | AI873644, AW131331, AW079572, |
| | | | | | AI580198, AI497733, AI431408, |
| | | | | | AL040827, F27788, AA225339, AI866770, |
| | | | | | AI889168, AW151136, AL038605, |
| | | | | | AI919345, AI954504, AI630252, |
| | | | | | AI890907, AW089275, AI826225, |
| | | | | | AI632408, AW087445, AI702073, |
| | | | | | AL120695, AW162194, AL045266, |
| | | | | | AI564749, AW088162, AI868204, |
| | | | | | AA470491, AL037582, AL037602, |
| | | | | | AI270183, AI470648, AI499381, |
| | | | | | AW268220, AI620075, AI802542, |
| | | | | | AI800138, AW050578, AW168031, |
| | | | | | AI955906, AI312428, AL079963, |
| | | | | | AW161156, AI334445, AW302965, |
| | | | | | AI1241923, AI345477, AI624548, |
| | | | | | AW302992, AL036638, AL110306, |
| | | | | | AI648473, AA572758, AW196105, |
| | | | | | AI886753, AI269862, AI612750, |
| | | | | | AI251221, AW022682, AA494167, |
| | | | | | AI929108, AW302988, AW163823, |
| | | | | | AI340603, AW074869, AI494201, |
| | | | | | AI349957, AI491775, AI677796, |
| | | | | | AI308032, AI284131, AI858827, |
| | | | | | AI934035, AI635492, AI874166, |
| | | | | | AI284517, AI537837, AI621179, |
| | | | | | AA427700, AI590830, AI254226, |
| | | | | | AI335209, AI699857, AI860783, |
| | | | | | AI919500, AI570807, AW004886, |
| | | | | | AI263331, AI358701, AI624293, |
| | | | | | AI623941, AI536574, AW238764, |
| | | | | | AW054931, AI829327, AW268302, |
| | | | | | AI419650, AW089405, AI569583, |
| | | | | | AI863382, AW072719, AI433384, |
| | | | | | AI499285, AA911767, AW169653, |
| | | | | | AI869377, AL037454, AW087915, |
| | | | | | AI564259, AL036980, AW169604, |
| | | | | | AL042744, AI439762, AI251830, |
| | | | | | AI890806, AI554821, AI812032, |
| | | | | | AI589267, AW170635, AI524526, |
| | | | | | AI916419, AI620284, AI571046, |
| | | | | | AL039086, AI950664, AI638798, |
| | | | | | AW020095, M433976, AI889189, |
| | | | | | AI345745, AI473536, AI612885, |
| | | | | | AI783504, AL046926, AI445990, |
| | | | | | AW089572, AW051088, AI886123, |
| | | | | | AW168485, AI690835, AI554344, |
| | | | | | AL036804, AI610799, AI679620, |
| | | | | | AI801325, AW403717, AI863191, |
| | | | | | AI590686, AI969601, AL118781, |
| | | | | | AI445992, AL036361, AI886415, |
| | | | | | AA580663, AI434741, AI886181, |
| | | | | | AI568870, AI471361, AI590134, |
| | | | | | AL117457, AF134803, AF134802, L29468, |
| | | | | | U78525, U42766, X63574, I89947, I48978, |
| | | | | | AF026124, AF113694, A08916, A08913, |
| | | | | | A08910, AL049430, AJ238278, A08909, |
| | | | | | E02349, AL080148, AL122049, A07647, |
| | | | | | AL050277, AF091084, AL049466, |
| | | | | | AL049283, AL050024, AF087943, Y09972, |
| | | | | | AL133016, AF177401, AL137480, |
| | | | | | AF146568, AL110222, AF028823, |
| | | | | | AR038854, AL050146, I89931, A08912, |
| | | | | | AF132676, AF061836, I49625, AL133560, |
| | | | | | AF097996, AF090900, I48979, AL122093, |
| | | | | | E06743, AL133080, AF111851, AF111849, |
| | | | | | AL049464, AL137533, AL122110, |
| | | | | | U35846, AF079765, AF104032, I00734, |
| | | | | | AL050393, S61953, AF113019, Y16645, |
| | | | | | AL049300, AL137557, Y11254, |
| | | | | | AL122050, AL137459, AF079763, |
| | | | | | AL133557, AL080127, AL050116, E00617, |
| | | | | | E00717, E00778, AL117394, AI2297, |
| | | | | | AL117435, AF057300, AF008439, |
| | | | | | AF057299, X72889, AR011880, AJ000937, |
| | | | | | AL133640, AL137271, Z72491, AL110221, |
| | | | | | AF090903, E08631, AF090896, E12747, |
| | | | | | AF113689, AL049452, AL049314, E07108, |
| | | | | | S78214, AF113676, AF158248, AL133072, |
| | | | | | AL137463, AF061943, AF118094, E04233, |
| | | | | | X84990, AL122098, A93350, U68387, |
| | | | | | AL117440, AL137521, AL080124, |
| | | | | | AR020905, AF067728, AL137478, |
| | | | | | AL137550, AL117583, AL133098, |
| | | | | | AF017152, Z37987, S68736, X83508, |
| | | | | | U49908, AF118064, AF118070, AL137560, |
| | | | | | X70685, AL117460, I09499, A45787, |
| | | | | | AL096744, AL133014, A08908, AF067790, |
| | | | | | AF113677, AL110196, AF183393, X92070, |
| | | | | | AL133075, AF125948, AL133565, A03736, |
| | | | | | AF026816, AF106862, AR013797, X82434, |
| | | | | | A65341, A77033, A77035, Z82022, |
| | | | | | AL050149, AL050108, AL050138, |
| | | | | | AL137476, A58524, AF078844, A58523, |
| | | | | | AF119337, AF003737, AF113690, E03348, |
| | | | | | AF090934, AF017437, AF162270, |
| | | | | | AL137526, L19437, AL133093, X87582, |
| | | | | | U67958, AF113699, M30514, AF153205, |
| | | | | | AR059958, AL117585, L31396, I66342, |
| | | | | | AF185576, AF090901, Y07905, X93495, |
| | | | | | E02221, L31397, AL137292, AJ012755, |
| | | | | | AF054599, U72620, I26207, AF090943, |
| | | | | | AF061795, AF151685, U80742, AB019565, |
| | | | | | AL137556, AL080074, AF113013, |
| | | | | | AL133568, AL133113, AJ006417, |
| | | | | | AL122121, D83032, AL080060, AF100931, |
| | | | | | I33392, AL049382, AL117416, AL110225, |
| | | | | | AL137488, AL050092, X96540, AF111112, |
| | | | | | Y10080, AP126247, I03321, AL049938, |
| | | | | | Y11587, AL080159, AL133665, E15569, |
| | | | | | AL12218, AL080137, AL137527, |
| | | | | | AL133606, AL110280, A93016, A90832, |
| | | | | | U00763, I42402, U58996, L30117, |
| | | | | | AL137273, X65873, AL080158, X53587, |
| | | | | | AR038969, AP118090, AJ242859, |
| | | | | | AF113691, AL080086, AL133104, |
| | | | | | AL133067, I09360, AR000496, U39656, |
| | | | | | AL137538, U96683, Y14314, AP125949, |
| | | | | | AL133077, AL117432, AF081197, |
| | | | | | AL122123, AL355885, and AL355885. |
| HHBEM70 | 35 | 756949 | 1-229 | 15-243 | AL119457, AL042544, AL119399, |
| | | | | | AL042382, AL079794, AL042440, |
| | | | | | AL119511, AL037081, AL119324, |
| | | | | | AL043152, AI110828, AW235489, |
| | | | | | AW082113, AI280670, AI064830, |
| | | | | | AI610362, AI352497, AW149925, |
| | | | | | AA809129, AL079741, AI886753, |
| | | | | | AI269862, AI364788, AL134999, |
| | | | | | AW151136, AL121270, AL047187, |
| | | | | | AI500061, AL043168, AI345111, |
| | | | | | AI491897, AW170674, AI624543, |
| | | | | | AL119863, AW117746, AI349598, |
| | | | | | AL041150, AW269097, AI933589, |
| | | | | | AI445992, AI922365, AL045500, |
| | | | | | AI824576, AI309443, AW087445, |
| | | | | | AI345416, AI345612, AW163834, |
| | | | | | AI345415, AL046931, AL121328, |
| | | | | | AW268302, AW026882, AI610307, |
| | | | | | AI567935, AW163464, AI620284, |
| | | | | | AI281772, AI445990, AA715307, |
| | | | | | AW051258, AI921248, AI611738, |
| | | | | | AI571909, AI619502, AI680162, |
| | | | | | AI632408, AI306613, AI677796, |
| | | | | | AI802542, AI433976, AI620089, |
| | | | | | AA449768, AI288305, AW118518, |
| | | | | | AI570807, AI635067, AI923370, |
| | | | | | AI627988, AL110402, AL047387, |
| | | | | | AI679174, AW168650, AI537677, |
| | | | | | AI670009, AI866770, AL047675, |
| | | | | | AI433157, AI702073, AI909696, |
| | | | | | AI554821, AW117882, AI284131, |
| | | | | | AI927755, AI174394, AW172745, N33175, |
| | | | | | AI539771, AL079960, AI582932, |
| | | | | | AI500659, AI633125, AI805769, |
| | | | | | AI698391, AI815232, AI801325, |
| | | | | | AI500523, AI915291, AL042628, |
| | | | | | AW071177, AI284517, AI923989, |
| | | | | | AI500706, AI491776, AI445237, |
| | | | | | AW151138, AA580663, AI521560, |
| | | | | | AI889189, AI500662, AI284509, N80094, |
| | | | | | AI889168, AI866573, AI633493, |
| | | | | | AL048323, AJ1434256, AW302973, |
| | | | | | AI289937, AI537244, AW268060, |
| | | | | | AW072719, AI888661, AI284513, |
| | | | | | AI888118, AI344785, AI889147, |
| | | | | | AL037454, AI440252, AW302965, |
| | | | | | AW072484, AI702019, AI634251, |
| | | | | | AI569309, AI433037, AI280732, |
| | | | | | AW071362, AW301300, AI348917, |
| | | | | | AI343037, AI499285, AW088134, |
| | | | | | AL120300, AL048340, F27788, AI446373, |
| | | | | | AI864836, AL043981, AI569328, |
| | | | | | AI307543, AI874166, AI307210, |
| | | | | | AI669526, AI340659, AI288285, |
| | | | | | AI801460, AI345005, AI311892, |
| | | | | | AI307736, AI783504, AL039276, |
| | | | | | AI349266, AI273048, AL119791, |
| | | | | | AL040241, AL045163, AI281762, |
| | | | | | AI494201, AI686554, AL042745, |
| | | | | | AI949960, AL079977, AI886123, |
| | | | | | AI524671, AL040243, AW050522, |
| | | | | | AI917252, AW083804, AI345471, |
| | | | | | AW149221, AL041862, AI673297, |
| | | | | | AI274508, AL039783, AL046926, |
| | | | | | AL045266, W74529, AI439745, AI922901, |
| | | | | | AI963846, AL042627, AL049085, |
| | | | | | AW198075, AL048334, AI872711, |
| | | | | | AI587606, AI468872, AI932794, |
| | | | | | AW081255, AI886181, AI690426, |
| | | | | | AI862142, AI873644, AI802826, |
| | | | | | AI445432, AL037582, AL037602, |
| | | | | | AL041772, AL036214, AL079963, |
| | | | | | AI345608, AW169658, AI559737, |
| | | | | | AW410972, AL037030, AI310575, |
| | | | | | AL039132, AI889376, AL047763, |
| | | | | | AI335363, AI538716, AW074993, |
| | | | | | AI591420, AI1362580, AI499986, |
| | | | | | AI560023, R32821, AI432218, AW051088, |
| | | | | | AL038504, AI308032, AI537515, |
| | | | | | AI934011, AL045620, AI308035, |
| | | | | | AI349276, AI281782, AI564719, |
| | | | | | AI866510, AI909642, Y11587, U77594, |
| | | | | | AC004987, I89947, AL122049, I48978, |
| | | | | | AL133640, AC004686, AL050159, |
| | | | | | A08913, AL133072, AF090934, Y14314, |
| | | | | | AL133077, A08916, A08910, A08909, |
| | | | | | S68736, AL050138, AL137271, Z82022, |
| | | | | | AL050277, I48979, X82434, I89931, |
| | | | | | AL110280, I49625, A77033, A77035, |
| | | | | | AF087943, AF183393, AL122110, |
| | | | | | AL133080, AF091084, I09360, AL080060, |
| | | | | | U35846, AF026816, I33392, AL050149, |
| | | | | | AL133016, U80742, AL122121, E07361, |
| | | | | | AL117460, AL110221, AF090903, |
| | | | | | AL117435, AJ012755, AL049283, |
| | | | | | AF118070, AL137550, AF017152, |
| | | | | | AF146568, AL137463, AF113019, X84990, |
| | | | | | AF090900, AL133560, AF111112, E03348, |
| | | | | | AF113689, AR059958, AL133075, |
| | | | | | AL133565, AL049466, A65341, AJ000937, |
| | | | | | AR000496, U39656, AL117583, A08912, |
| | | | | | AL117585, AL13313, X93495, |
| | | | | | AL122123, X72889, AC004594, |
| | | | | | AL049300, AL049452, AL110197, |
| | | | | | A93350, AL117457, AR038854, |
| | | | | | AL096744, U91329, AF003737, AL049938, |
| | | | | | AL137557, AF106862, AF113677, U67958, |
| | | | | | E02349, AF079763, AL137538, E07108, |
| | | | | | AF113676, AF158248, AF185576, A03736, |
| | | | | | I26207, AF118094, AF067728, AL050024, |
| | | | | | AL049430, AF113699, AL133557, |
| | | | | | AF125948, A45787, AF177401, S78214, |
| | | | | | AF090901, AL050393, AR011880, |
| | | | | | AL080124, AF113690, AF118064, |
| | | | | | AL133093, AL122050, AL137560, |
| | | | | | AL137459, AJ238278, AL122098, U00763, |
| | | | | | AL080127, L31396, AL133014, AL080137, |
| | | | | | AL137527, AF079765, L31397, X63574, |
| | | | | | U72620, A58524, A58523, A93016, |
| | | | | | AL049382, I42402, AL050172, AF162270, |
| | | | | | AL050116, A12297, AF057300, AF057299, |
| | | | | | AF061943, AF119337, AL137556, I03321, |
| | | | | | AF113691, AF104032, AF017437, E15569, |
| | | | | | AF113013, AL049464, AF078844, Y16645, |
| | | | | | AF097996, Y11254, AL110196, AF111851, |
| | | | | | AF026124, AL050108, AF090896, |
| | | | | | AL122093, X65873, U42766, AL137521, |
| | | | | | X96540, AB019565, AF113694, AF090943, |
| | | | | | X70685, AL049314, AL137648, AI242859, |
| | | | | | AF125949, AL050146, AL110225, |
| | | | | | AL117394, AL133606, AL137476, E08263, |
| | | | | | E08264, L30117, AL137533, AL137480, |
| | | | | | AF061795, AF151685, AL117440, |
| | | | | | AL133104, AL133067, L19437, S61953, |
| | | | | | AL137526, AF132676, AF061836, |
| | | | | | AF111849, AL137523, U96683, A07647, |
| | | | | | AR038969, X87582, E04233, E02221, |
| | | | | | AF153205, X98834, AL133098, Z37987, |
| | | | | | AL133568, AL034417, AC004383, |
| | | | | | AR013797, AF051195, AL137283, |
| | | | | | AL080074, E05822, AL137478, Z72491, |
| | | | | | AC002464, Y09972, AL023657, I00734, |
| | | | | | M30514, E00617, E00717, E00778, |
| | | | | | AF061981, U78525, AL117432, U58996, |
| | | | | | AF061573, AF051197, AL034400, |
| | | | | | AL137294, AF095901, AI8777, A90832, |
| | | | | | E08631, AC011953, AC027300, and |
| | | | | | AC025036. |
| HHEQE88 | 36 | 1151485 | 1-212 | 15-226 | |
| HHSFC32 | 37 | 1053062 | 1-460 | 15-474 | |
| HHSFI32 | 38 | 1151488 | 1-231 | 15-245 | |
| HJABA68 | 39 | 1150871 | 1-1303 | 15-1317 | |
| HLDOX35 | 40 | 1151493 | 1-274 | 15-288 | |
| HLYCF37 | 41 | 949401 | 1-1327 | 15-1341 | AL138431, AL042377, AI871691, |
| | | | | | AI423034, AI419419, AW020150, |
| | | | | | AI380617, AI801479, AI440117, |
| | | | | | AL043052, AL044489, AW237905, |
| | | | | | AI904840, AL118843, AA282951, |
| | | | | | AW020094, AA225406, AL041375, |
| | | | | | AW021399, AW272294, AL037910, |
| | | | | | AI066646, AA551519, AW268322, |
| | | | | | AI279417, AI800426, AL135357, |
| | | | | | AA594157, AL138455, AA713946, |
| | | | | | AI242011, AI635028, AW238712, |
| | | | | | AI479148, AL041924, AA714110, |
| | | | | | AA760655, T05118, AI054418, |
| | | | | | AW275432, AL110373, AI356440, |
| | | | | | AA720582, AA584765, R98002, F30310, |
| | | | | | AA286836, AI554471, AA847395, |
| | | | | | AI445224, AI049643, AI095197, |
| | | | | | AI270177, AI032875, AA654874, |
| | | | | | AA808153, AI955029, W02749, AI086646, |
| | | | | | AW340905, AL042753, AI445297, |
| | | | | | AI755202, AL022165, AC002558, Z86090, |
| | | | | | AF205588, AL035420, AG006965, |
| | | | | | AC004832, AL022721, AC005779, |
| | | | | | AG005088, AC002563, AC005005, |
| | | | | | AF196779, AC004987, U91323, AP000116, |
| | | | | | L78810, AC007283, AC002991, |
| | | | | | AC010077, AC002477, Z99716, |
| | | | | | AC005527, AG005409, AP000042, |
| | | | | | AL022238, AC004383, Z95116, AL035405, |
| | | | | | AC006480, AC004813, AC002430, |
| | | | | | AC006211, AC005081, AP000045, |
| | | | | | AC007899, AC004858, AL096791, |
| | | | | | AC005291, AC006441, AC007055, |
| | | | | | Z95114, AC007384, AC002369, |
| | | | | | AC002401, AC005519, AL008731, |
| | | | | | AC020663, AC004874, AL023584, |
| | | | | | Z82206, AL031005, Z84487, U47924, |
| | | | | | AC005940, AC005180, AC004662, |
| | | | | | AL008582, AL121603, AC004033, |
| | | | | | AC002288, AP000311, AC006312, |
| | | | | | AL109798, AC005225, AL049872, |
| | | | | | AC00501S, AF001549, AC005365, |
| | | | | | AL136295, AC005971, AP000289, |
| | | | | | AC007934, Z84466, AC005871, |
| | | | | | AL031311, AC005086, AC005902, |
| | | | | | AP000110, AC006241, Z85996, AC004883, |
| | | | | | AC005071, AC004125, AC012384, |
| | | | | | AP000692, AL031228, AF001548, Z98036, |
| | | | | | AC007193, AC005072, AL035659, |
| | | | | | AP000117, AC007563, AC003663, |
| | | | | | AC005529, AL050318, AF047825, |
| | | | | | AC004953, AL109827, AC002044, |
| | | | | | AL022318, AC004703, AF017104, |
| | | | | | AC002554, AC005663, Z93244, |
| | | | | | AL032821, AC007225, L44140, |
| | | | | | AC005829, AJ003147, AC006948, |
| | | | | | AF038458, AC005911, AC006121, |
| | | | | | AC006511, AL020997, AF053356, |
| | | | | | AL031597, AC002504, Z98743, |
| | | | | | AC002394, U95739, AP000501, |
| | | | | | AC006323, Z94056, AL008726, |
| | | | | | AC004084, AC004520, AL122020, |
| | | | | | AC005006, AC007057, AP000313, |
| | | | | | AL031680, AC005666, AC004814, |
| | | | | | AC005726, AL109952, AC004685, |
| | | | | | AF024533, AC002565, AL049552, |
| | | | | | AL008718, AC005696, AL031281, |
| | | | | | U91321, AP000252, AC005207, |
| | | | | | AL031667, AC004408, AC005037, |
| | | | | | AC004492, AL022311, U96629, |
| | | | | | AC016830, AC006285, AL133163, |
| | | | | | AC007216, AL021977, AP000030, |
| | | | | | AC002314, Z82203, AL049779, |
| | | | | | AC007676, AF129756, AL132712, |
| | | | | | AP000356, AC005800, AP000050, |
| | | | | | AC004876, AL121754, AC004851, |
| | | | | | AC005695, Z77249, AC004672, AP000103, |
| | | | | | AL034421, AL031846, AL080317, |
| | | | | | AC005900, AC005484, AC005332, |
| | | | | | AC006255, AC004263, U62317, Z98304, |
| | | | | | AC002544, AC004878, AL023653, |
| | | | | | AC005190, AL049694, AC002365, |
| | | | | | AF134726, Z93017, AL121655, AC006538, |
| | | | | | AF111168, AP000133, AP000211, |
| | | | | | AF030453, AC006449, AC000052, |
| | | | | | AC005730, AL022334, AC004583, |
| | | | | | AC003015, AC006014, AC005933, |
| | | | | | AL021918, U91326, AC003029, |
| | | | | | AC004859, AL035587, AC002375, |
| | | | | | AC004686, U95090, AL009181, |
| | | | | | AC007386, AL078581, AL049780, |
| | | | | | D88270, AC007298, AC003072, |
| | | | | | AP000167, AC004881, AL049856, |
| | | | | | AC004765, AC004560, AC004139, |
| | | | | | AC007686, AL109984, AC004966, |
| | | | | | AC004991, AC003043, AP000301, |
| | | | | | AL049869, AC004983, AL022315, |
| | | | | | AC005520, AF001550, AC005500, Z98742, |
| | | | | | AL035455, AC007151, AC002551, |
| | | | | | AC010072, AC007227, AC007731, |
| | | | | | AL159172, AL159172, AL159172, |
| | | | | | AC058800, and AC058800. |
| HLYHK34 | 42 | 1151496 | 1-252 | 15-266 | |
| HMUAB01 | 43 | 1151502 | 1-338 | 15-352 | |
| HMVDU16 | 44 | 1105310 | 1-1280 | 15-1294 | |
| HOGCL27 | 45 | 944819 | 1-1197 | 15-1211 | |
| HOSED04 | 46 | 1162657 | 1-967 | 15-981 | |
| HOVAP01 | 47 | 1150835 | 1-303 | 15-317 | |
| HPCPN11 | 48 | 1179757 | 1-370 | 15-384 | |
| HPLAS10 | 49 | 503774 | 1-411 | 15-425 | AA367885, R69938, R28193, R81427, |
| | | | | | R26740, H78098, H12467, R32705, |
| | | | | | H68658, R28309, R26685, R28382, |
| | | | | | R76671, H79604, R76677, R32518, |
| | | | | | R80677, R63675, R77414, R79115, |
| | | | | | H03930, AA367784, R69804, H13421, |
| | | | | | R71045, R79061, R69252, R67876, |
| | | | | | R24254, AA564171, AI244500, |
| | | | | | AW298380, AI765947, AA411112, |
| | | | | | AA235525, AA236697, AI682985, T95910, |
| | | | | | T24700, AI672705, AI961748, AW074013, |
| | | | | | AA429290, AI656685, AI962580, N45236, |
| | | | | | AI051767, AI830819, AI744897, |
| | | | | | AA565430, AI685384, AA292246, |
| | | | | | AI719461, AA411111, AW135966, |
| | | | | | AA428704, AA430655, H00975, R75656, |
| | | | | | R23234, R94826, H28769, R32651, |
| | | | | | AW081078, AI080768, R66563, R68709, |
| | | | | | AL045777, H90432, R62204, AI434550, |
| | | | | | AL040241, AW022636, R78396, |
| | | | | | AI648567, AL039086, AI590043, |
| | | | | | AI345416, AI345612, AI345415, |
| | | | | | AL120819, R39622, AI472566, AI859644, |
| | | | | | AI567582, R25628, AI589428, AI540674, |
| | | | | | H89138, AI805688, AI915295, AI344785, |
| | | | | | AL036638, AI345688, AI752007, |
| | | | | | AI471361, AI932949, AI538342, |
| | | | | | AI539800, AI636619, AW239367, |
| | | | | | AW079572, AI267185, AL046944, |
| | | | | | AW022075, R81679, AW020419, |
| | | | | | AI540606, AI335426, AI348777, |
| | | | | | AI343059, AI865320, AI471429, |
| | | | | | AI680326, AI866573, AI570966, |
| | | | | | AW403717, AW075084, AW302854, |
| | | | | | AL038564, AI308032, AI500061, |
| | | | | | AW020710, Z98446, AW022682, |
| | | | | | AL048644, AI888621, AI251830, |
| | | | | | AI244380, AW129271, AW409775, |
| | | | | | AW020397, AI890507, AW150794, |
| | | | | | AI289791, AI679550, AW172723, |
| | | | | | AI335209, AW089006, R66759, |
| | | | | | AA806719, AW082623, AW268261, |
| | | | | | AI334450, AI537677, AW084097, |
| | | | | | AI568060, AW051088, AW268220, |
| | | | | | AI582912, AI309306, AI473528, |
| | | | | | AL036664, AL038529, AA835966, |
| | | | | | AI799195, AI334895, AI698391, |
| | | | | | AL039276, AI636788, AL046466, |
| | | | | | AI433611, AW025279, AI917963, |
| | | | | | AI921254, AL041150, AI349944, |
| | | | | | AW131999, AW088899, AI559863, |
| | | | | | AI539153, AI624529, AL037582, |
| | | | | | AI918554, AW411159, AL037602, |
| | | | | | AI613548, AL045349, AI539771, R28164, |
| | | | | | AI873638, AW163834, AI866608, |
| | | | | | AI859464, AW162194, AI560545, |
| | | | | | AI491710, AI611743, AI348897, |
| | | | | | AI249877, AI345251, AL119791, |
| | | | | | AW021717, AI349004, AI289542, |
| | | | | | AI365256, AI307494, AI586931, |
| | | | | | AI310575, AW085786, AI313352, |
| | | | | | AW265004, AI349622, AI472536, |
| | | | | | AA420722, AI677797, AI889147, |
| | | | | | AI473451, AW271119, AL040243, |
| | | | | | AI334452, AI340533, N99092, AI344938, |
| | | | | | AI589668, AW150457, AA830821, |
| | | | | | AW191844, AW304497, AW022102, |
| | | | | | AI696626, AI955945, AI922901, |
| | | | | | AW104141, AI340511, AI669639, |
| | | | | | AI866461, AI950692, F36859, AL049053, |
| | | | | | AI446373, AL036652, AW193467, |
| | | | | | AI267162, AI345608, AI569367, |
| | | | | | AI446124, AW082532, AI872722, |
| | | | | | AA580663, AA658033, AI345746, |
| | | | | | AI678446, AI564186, AI064787, |
| | | | | | AI357599, AC005281, AF085838, |
| | | | | | AC007114, D28589, AC004617, U77594, |
| | | | | | I48978, A08910, I89947, X72889, |
| | | | | | AL050277, A08909, A08908, S69510, |
| | | | | | A08916, AI8777, A08913, AL137556, |
| | | | | | AL137660, A08912, AF113694, X66862, |
| | | | | | U35846, S76508, I00734, AR038854, |
| | | | | | AF090934, Y08769, E00617, E00717, |
| | | | | | E00778, E03348, E03349, AF151109, |
| | | | | | I89931, I09499, AL049339, I49625, |
| | | | | | AL049452, AL122100, AF032666, |
| | | | | | AE114818, I48979, L30117, I89934, |
| | | | | | AL080074, AF113689, U95114, AJ010277, |
| | | | | | S68736, AF113013, S77771, AF078844, |
| | | | | | AL117648, Z72491, AF106697, U68233, |
| | | | | | I92592, U42031, U96683, D83989, |
| | | | | | AF113019, AL133067, A86558, AL137711, |
| | | | | | AL110221, AL137276, AF113690, A08907, |
| | | | | | A03736, AL137665, AL110280, AF067790, |
| | | | | | AL137283, X79812, A65341, AL137538, |
| | | | | | AL133010, X65873, A21103, A57389, |
| | | | | | S63521, AR000496, AL049382, U39656, |
| | | | | | AF176651, AL117585, Z37987, AF205861, |
| | | | | | AF162270, AF104032, AL080124, |
| | | | | | AF111851, AR059958, M27260, Y14314, |
| | | | | | AL023657, AF139986, AR011880, |
| | | | | | AL137300, I89944, AF215669, X72387, |
| | | | | | AL080110, AL137459, AF079763, X52128, |
| | | | | | E07108, AL137480, AL050170, Z97214, |
| | | | | | AF026816, X06146, AF113677, AL117629, |
| | | | | | AL122118, AF137367, E02221, E01614, |
| | | | | | E13364, AF111112, AL080060, AF003737, |
| | | | | | Y10823, I42402, AJ238278, AF058921, |
| | | | | | AL133665, AR034821, AF008439, |
| | | | | | X53587, AB019565, A08911, AF119337, |
| | | | | | AL133104, AF114170, AC006336, |
| | | | | | A07588, AF118094, E04233, X62580, |
| | | | | | AL133081, AL049466, J05032, AF090886, |
| | | | | | AF125948, AF113676, X57961, AF090901, |
| | | | | | X63410, S75997, AR020905, AF091084, |
| | | | | | AF017437, AF126247, X66871, S36676, |
| | | | | | AF097996, AL137557, Y11254, AL137478, |
| | | | | | U53505, E15324, AL117460, E06743, |
| | | | | | AL050149, AL050116, AL080140, |
| | | | | | AF177401, S79832, AL122093, AL133619, |
| | | | | | U42766, AL133606, AL137548, AF102578, |
| | | | | | AF022363, AL122121, AF000145, |
| | | | | | AL137479, X96540, AF061943, AL050366, |
| | | | | | A58524, A58523, A93016, AC004200, |
| | | | | | AL049324, X76228, AL050154, |
| | | | | | AL122098, AL137574, AF185576, |
| | | | | | AL080126, AL050092, AL096751, |
| | | | | | AL080129, AL133565, M92439, A08915, |
| | | | | | U00763, AG002467, AL137463, |
| | | | | | AF036941, A65340, AF067728, Y11587, |
| | | | | | E02253, U67958, AL110196, AL137271, |
| | | | | | AF210052, Z82022, AF183393, AF153205, |
| | | | | | AF017790, AB007812, A93350, E01314, |
| | | | | | A45787, AF158248, AL117440, D16301, |
| | | | | | AL137488, AL050138, AF113691, A18788, |
| | | | | | D55641, I41145, AF207750, AL133637, |
| | | | | | X56039, X87582, E05822, I26207, A83556, |
| | | | | | AF087943, AF132676, AL122106, |
| | | | | | AF061836, X84990, AF026124, and |
| | | | | | U57352. |
| HPQCK13 | 50 | 978564 | 1-208 | 15-222 | |
| HSVAJ47 | 51 | 1193053 | 1-205 | 15-219 | |
| HSYDH59 | 52 | 1151513 | 1-1200 | 15-1214 | |
| HTTEV13 | 53 | 1165306 | 1-1425 | 15-1439 | |
| HTWCG65 | 54 | 1150839 | 1-293 | 15-307 | |
| HULAI37 | 55 | 1081031 | 1-160 | 15-174 | |
| HUSXZ80 | 56 | 1164015 | 1-253 | 15-267 | |
| HUSYN11 | 57 | 1150840 | 1-302 | 15-316 | |
| HVAEI40 | 58 | 1151525 | 1-210 | 15-224 | |
| HVAET61 | 59 | 1151526 | 1-570 | 15-584 | |
| HWLBU68 | 60 | 1151535 | 1-346 | 15-360 | |
| HWLQB94 | 61 | 1077696 | 1-170 | 15-184 | |
| HWLQG27 | 62 | 1224970 | 1-1322 | 15-1336 | |
| HWLQZ02 | 63 | 918869 | 1-195 | 15-209 | AW149925, AW081797, AW129230, |
| | | | | | AI796743, AW104724, AI539771, |
| | | | | | AI621209, AI587606, AI927755, |
| | | | | | AI922365, AI627988, AI932794, |
| | | | | | AL040243, AI559296, AI611738, |
| | | | | | AI570807, AL042628, AI680162, |
| | | | | | AI570989, AL041862, AI249962, |
| | | | | | AI610115, AI890223, AI584140, |
| | | | | | AW088903, AI670009, AW079572, |
| | | | | | AW082088, AI633125, AI802542, |
| | | | | | AI684234, AI696819, AI884469, |
| | | | | | AI862142, AI591316, AI571909, F27788, |
| | | | | | AW151136, AI623179, AI627893, |
| | | | | | AI637584, AI863082, AW029611, |
| | | | | | AI564259, AI591420, AW051258, |
| | | | | | AI582932, AI352497, AI624543, |
| | | | | | AI564723, AI923768, AI784252, |
| | | | | | AI468872, AI811344, AI890833, |
| | | | | | AI926790, AI564719, AW105601, |
| | | | | | AW151714, AI619502, AI677796, |
| | | | | | AI306705, AW026882, AL037582, |
| | | | | | AL037602, AI889376, AW073697, |
| | | | | | AI963062, AI355827, AI274647, |
| | | | | | AI889147, AI289337, AI433157, |
| | | | | | AL119748, AI702073, AI554821, |
| | | | | | AI270183, AI805769, AI634251, |
| | | | | | AW169001, AW104836, AI570909, |
| | | | | | AI249877, AI862139, AI640873, |
| | | | | | AI915291, AW194441, AI433976, |
| | | | | | AI684305, AW148536, AI273085, |
| | | | | | AW103063, AI590227, AW151729, |
| | | | | | AI687287, AW268122, AI917938, |
| | | | | | AI537677, AW169790, AI500659, |
| | | | | | AI932966, AI923370, AI819326, |
| | | | | | AI815232, AI888501, AI801325, |
| | | | | | AI500523, AI554427, AI284517, |
| | | | | | AI923989, AI653979, AI500706, |
| | | | | | AI280732, AI445237, AI491776, |
| | | | | | AW151138, AW150457, AI889189, |
| | | | | | AI521560, AI500662, AI284509, |
| | | | | | AI499285, AI889168, AI886415, |
| | | | | | AI432736, AI866573, AI633493, |
| | | | | | AI434256, AW078929, AW190042, |
| | | | | | AL045266, AI888661, AI284513, |
| | | | | | AL046926, AW073994, AI888118, |
| | | | | | AI889953, AI520809, AW167918, |
| | | | | | AI440252, AI624693, AI890214, |
| | | | | | AI589273, AI687362, AI568138, |
| | | | | | AI625464, AI568855, AI768496, |
| | | | | | AI288305, AI284131, AI801766, |
| | | | | | AI648684, AI698391, AI567582, |
| | | | | | AI280689, AL038605, AI682798, |
| | | | | | AI624548, AI254731, AI690784, |
| | | | | | AW169604, AI494201, AW198090, |
| | | | | | AI632408, AI537024, AW118518, |
| | | | | | AI269862, AI805385, AW075381, |
| | | | | | AI580190, AI097248, AW051298, |
| | | | | | AW085681, AI635461, AI921176, |
| | | | | | AL042745, AI249257, AI440448, |
| | | | | | AI886124, AI887396, AL042551, |
| | | | | | AI798456, AI452560, AW054931, |
| | | | | | AI828731, AI521596, AI569583, |
| | | | | | AL046942, AI824576, AW078945, |
| | | | | | AI679321, AI273901, AI922676, |
| | | | | | AI872910, AI440239, AI916419, |
| | | | | | AI868831, AI869377, AI500061, |
| | | | | | AW075305, AI499131, AI445829, |
| | | | | | AW118332, AI493576, AI648663, |
| | | | | | AI524671, AI628217, AI439745, |
| | | | | | AI634345, AI818683, AI539847, |
| | | | | | AW129916, AW192652, AW150762, |
| | | | | | AI436456, AW263809, AL040241, |
| | | | | | AI924686, AL134830, AW169671, |
| | | | | | AI686817, AI269696, AA788861, |
| | | | | | AI224027, AI824746, AI620284, |
| | | | | | AI432969, AI536638, AI364788, |
| | | | | | AI431327, AI912435, AI701074, |
| | | | | | AI446802, AI306613, AI956080, |
| | | | | | AI862144, AW190194, AI923124, |
| | | | | | AL045500, AI590021, AI538259, |
| | | | | | AI476478, AW166970, AI612759, |
| | | | | | AI582558, AI366900, AI475394, |
| | | | | | AI611743, AW166583, AI493559, |
| | | | | | AL122049, AI2297, AL080159, 148978, |
| | | | | | Z82022, AF111851, I89947, A77033, |
| | | | | | A77035, I48979, AL049452, AL050149, |
| | | | | | AL137550, A08916, X65873, A08910, |
| | | | | | A08909, A08913, AR000496, U39656, |
| | | | | | I89931, AF113691, AF153205, X84990, |
| | | | | | I49625, Y11587, Y11254, A45787, |
| | | | | | AF113013, AL133075, AF078844, |
| | | | | | AL137459, AL050138, AL133072, |
| | | | | | X82434, AF118094, AL117585, AF090901, |
| | | | | | AF026816, AL137463, AF113677, |
| | | | | | AL137271, AF183393, A93350, AF026124, |
| | | | | | E07108, AL117435, AL049382, AF104032, |
| | | | | | AL122110, AF113690, AF113019, |
| | | | | | AL137557, AL133080, AF081195, |
| | | | | | AL133077, U35846, AR011880, E07361, |
| | | | | | AF118070, U67958, AL122098, AF113676, |
| | | | | | U80742, AL117460, A65341, AL133640, |
| | | | | | E02349, I42402, AF125948, AL133113, |
| | | | | | AB019565, AL110280, AF119337, |
| | | | | | U00763, AF067728, AL137560, AL137538, |
| | | | | | U96683, AF158248, X72889, AF091084, |
| | | | | | A58524, AF081197, A58523, AF017437, |
| | | | | | AF113689, AF097996, AL117583, |
| | | | | | AJ238278, AL110221, S68736, AL122093, |
| | | | | | U42766, X96540, AF061943, AL080060, |
| | | | | | AL122123, AL133557, I00734, AF090903, |
| | | | | | AF177401, AL080124, AJ000937, I33392, |
| | | | | | E00617, E00717, E00778, AJ012755, |
| | | | | | AL133568, E15569, AL049464, S78214, |
| | | | | | AL050277, AF106862, X98834, AL049466, |
| | | | | | AF113694, E03348, AF090934, Y16645, |
| | | | | | AL110196, AR059958, AL133016, |
| | | | | | AL050393, X93495, AF079765, AL122121, |
| | | | | | AF090943, I09360, X70685, AL049314, |
| | | | | | Z72491, AL137648, AJ242859, AL117457, |
| | | | | | AF125949, L31396, AL096744, AL050146, |
| | | | | | AL110225, AL117394, AL133606, L31397, |
| | | | | | X63574, I41145, AL080127, AF090900, |
| | | | | | I03321, AF087943, AF146568, AL080137, |
| | | | | | AF111112, AC002467, AL133093, |
| | | | | | AF017152, AL050116, AL050108, |
| | | | | | AF185576, AL133560, A08912, AL137527, |
| | | | | | I26207, AL137476, AL133104, A93016, |
| | | | | | AL050024, AL122050, AL049430, |
| | | | | | AF113699, AL133014, AF090896, |
| | | | | | AL133565, A03736, AL137521, AF118064, |
| | | | | | S61953, U72620, E08263, E08264, |
| | | | | | AL137556, Y14314, AR038854, |
| | | | | | AF003737, AL050172, AL049938, |
| | | | | | AL110197, AF079763, A07647, U91329, |
| | | | | | AL137526, AL137533, AC002464, |
| | | | | | AL133067, AL049283, AL117440, |
| | | | | | AF008439, AL049300, AF162270, S79832, |
| | | | | | AL080074, M30514, AL133098, |
| | | | | | AF022363, AF061981, AF057300, |
| | | | | | AF057299, AR038969, AC004686, |
| | | | | | AL137283, A90832, AF067790, L30117, |
| | | | | | Y09972, AF061573, E04233, U68387, |
| | | | | | AL034417, AF111849, AL137480, L19437, |
| | | | | | E05822, AL137523, Z37987, AL050366, |
| | | | | | U49908, AC005992, X87582, U58996, |
| | | | | | AF000145, E02221, AJ006417, E08631, |
| | | | | | Y07905, AR013797, AL035407, |
| | | | | | AL137488, AL117432, X53587, |
| | | | | | AR020905, AC004383, AF132676, |
| | | | | | AF061836, X92070, AL122118, AL080086, |
| | | | | | U78525, AC011953, AC016327, |
| | | | | | AC012119, AC022231, AL359092, |
| | | | | | AC009453, AC023242, and AC025036. |
| HWLRB78 | 64 | 1151536 | 1-270 | 15-284 | |
| HWMNE82 | 65 | 968643 | 1-223 | 15-237 | |
| HWWFC08 | 66 | 1151537 | 1-470 | 15-484 | |
| HWWFY87 | 67 | 1192500 | 1-464 | 15-478 | |
| HYAAS55 | 68 | 1151540 | 1-1238 | 15-1252 | |
| HELFT59 | 69 | 745571 | 1-293 | 15-307 | AI291868, F02976, R49334, AA317151, |
| | | | | | F00909, AA083096, AL039222, R39346, |
| | | | | | AI016162, AL046623, R60562, N56138, |
| | | | | | F00748, AA219756, N85345, AA219752, |
| | | | | | AL096773, AF077054, AB020692, |
| | | | | | AF070542, and X52311. |
| HTLBG23 | 70 | 908391 | 1-522 | 15-536 | AA001483, H85820, R14221, AA012843, |
| | | | | | R12556, H30860, AB027011, AL023553, |
| | | | | | X89962, AL023553, AL023553, and |
| | | | | | AL023553. |
| HKGCC54 | 71 | 968183 | 1-748 | 15-762 | AI802158, AA188603, AAI67150, |
| | | | | | AA417344, AA417340, and AI658489. |
| HBXDN39 | 72 | 508449 | 1-496 | 15-510 | R18219, H10026, AL121141, Z46133, |
| | | | | | AW402804, AA318135, AL022393, |
| | | | | | U88081, U62392, AC022657, and |
| | | | | | AC022657. |
| HUSFH37 | 73 | 523045 | 1-761 | 15-775 | AW068873, AI168419, AA478202, |
| | | | | | W26086, AI651737, D50928, AC004611, |
| | | | | | AC004611, AC004611, and AC004611. |
| HOUFR33 | 74 | 572611 | 1-372 | 15-386 | AL121100, AF124726, AB014570, |
| | | | | | AL117258, AL117258, AL117258, and |
| | | | | | AL117258. |
| HFKFM24 | 75 | 677398 | 1-541 | 15-555 | |
| HDPTG17 | 76 | 693874 | 1-745 | 15-759 | AA279717, AI382584, AW444513, |
| | | | | | AW195231, AC004232, AC003966, |
| | | | | | AC004232, AC004232, AC004232, |
| | | | | | AC025283, AC025283, and AC025283. |
| HFITZ54 | 77 | 729592 | 1-551 | 15-565 | W37662, N48625, N34386, AF055077, and |
| | | | | | AF055078. |
| HNTCQ86 | 78 | 784814 | 1-651 | 15-665 | |
| HNTCJ76 | 79 | 908945 | 1-1128 | 15-1142 | AI198551, AAI59835, T46864, N41548, |
| | | | | | AA009475, W84805, AA283911, and |
| | | | | | AC004522. |
| HDPOH15 | 80 | 909193 | 1-472 | 15-486 | T87695, AA314608, AA315122, |
| | | | | | AA091590, AF080170, AC012146, and |
| | | | | | AC012146. |
| HFPBV40 | 81 | 909194 | 1-764 | 15-778 | AI362955, H92001, AA333315, AA333417, |
| | | | | | AW043881, R10465, AI081685, H89951, |
| | | | | | AJ236585, AC011815, AC011815, and |
| | | | | | AC011815. |
| HWMEG01 | 82 | 915157 | 1-796 | 15-810 | AI828083, AW160667, AW163357, |
| | | | | | AW003586, AW340331, AL047496, |
| | | | | | AW055238, AW163275, AI953511, |
| | | | | | AI763343, AA496422, AI762799, |
| | | | | | AI361240, AI480052, AW025474, |
| | | | | | AI458448, AW117928, AI424823, |
| | | | | | AW026498, AI128126, AW204096, |
| | | | | | AI803979, AI760473, AL047497, |
| | | | | | AI660575, AI744643, AW014107, |
| | | | | | AI261897, AI656565, AI741729, |
| | | | | | AI740619, AI419318, AI742293, |
| | | | | | AI655370, AI652905, AI589563, |
| | | | | | AI589648, AI439131, AI819820, |
| | | | | | AI091326, AW026841, AI359934, |
| | | | | | AW204205, AI264264, AW024642, |
| | | | | | AI949610, AI560440, AI198373, |
| | | | | | AI423960, AI362855, AI250912, |
| | | | | | AA767899, AI073530, AI285325, |
| | | | | | AI140798, AW051310, AI016047, |
| | | | | | AW073872, AI087387, AA505680, |
| | | | | | AI264612, AW275965, AI984692, |
| | | | | | AA490594, AI142069, AI284341, |
| | | | | | AI911464, AI199079, AI739092, |
| | | | | | AA437102, AA613443, AI968705, |
| | | | | | AI452963, AA587344, AW016008, |
| | | | | | AA433889, AI279964, AI189614, |
| | | | | | AI362846, AI478963, AA676847, |
| | | | | | AI886835, AI290629, AW015173, |
| | | | | | AI672281, AI421930, AI523562, |
| | | | | | AI934551, AI264259, AW137586, |
| | | | | | AW026072, AI749717, AI263343, |
| | | | | | AI673182, AW406201, AW089239, |
| | | | | | N67764, W15203, AI472898, AI039037, |
| | | | | | N52325, AA262739, AW193612, W74698, |
| | | | | | AI401704, AW183852, AA481624, |
| | | | | | AI381411, AA723039, AI074795, N24751, |
| | | | | | AA748147, AA419041, AW044046, |
| | | | | | AA594323, AA768224, AA434567, |
| | | | | | W69127, AW058489, AA431867, |
| | | | | | AI884635, AA582486, W40372, AI365044, |
| | | | | | AA903750, AA742365, AA865690, |
| | | | | | AA811867, W74736, AA035176, |
| | | | | | AI657003, AI804660, AI434830, |
| | | | | | AAI49088, AI423878, N32707, H99516, |
| | | | | | N93879, W69094, W03609, R71740, |
| | | | | | AI085987, AI565443, R49789, AA836579, |
| | | | | | H79224, N75095, AAI49089, H73502, |
| | | | | | AI085986, AA628759, AA805188, |
| | | | | | AA423795, R71735, AW003589, |
| | | | | | AI086418, H99515, AA613653, AA035175, |
| | | | | | AA330415, AI803981, AA481558, |
| | | | | | AI476776, AA972245, AA358704, H87423, |
| | | | | | AA782893, AI418853, AA430724, |
| | | | | | AA490725, N44511, AA026984, |
| | | | | | AA903090, R25354, AA490789, |
| | | | | | AW404267, AA427515, AA491216, |
| | | | | | AA894756, AA780359, AA292696, |
| | | | | | AA482612, AA563795, AA431866, |
| | | | | | AA464357, N23000, D12289, AI654137, |
| | | | | | AF220501, and AF106473. |
| HE8TO32 | 83 | 918867 | 1-3299 | 15-3313 | W95023, AI912047, AW418746, |
| | | | | | AI750575, AL119720, AA419275, |
| | | | | | AW051334, AW264052, AW418747, |
| | | | | | AA548405, AI376149, AA188811, |
| | | | | | AA778836, AI379277, AI698179, |
| | | | | | AI797042, AI803056, AI376633, |
| | | | | | AW270874, AA908965, AW150217, |
| | | | | | AW014151, AA541747, AI052657, |
| | | | | | AA022462, AW238806, AA022588, |
| | | | | | AA234279, AI832829, AA972137, |
| | | | | | AW205825, AI702699, AW173226, |
| | | | | | AA587331, AA419326, W80483, |
| | | | | | AA598615, AA600353, AA776223, |
| | | | | | AI824498, AI215857, AA748638, R53688, |
| | | | | | R37335, R66833, AW104138, AI420018, |
| | | | | | H08637, AA022587, W78715, AI470519, |
| | | | | | AI246670, R53576, AA252077, AA456687, |
| | | | | | AI750574, AI301963, AI143309, |
| | | | | | AI630071, Z42533, Z36290, W93339, |
| | | | | | H96167, AAI89036, H17107, AI799785, |
| | | | | | AI051523, N66983, H23004, AI985401, |
| | | | | | AA765425, F05295, T52309, N26896, |
| | | | | | AI869778, W68310, F09288, F08945, |
| | | | | | Z38724, N39779, Z41483, F01545, |
| | | | | | AA252128, AA456289, AW078790, |
| | | | | | F03636, AI368516, AA236369, C03276, |
| | | | | | AI810899, F05294, AA731019, AI033359, |
| | | | | | F01550, AL134524, AA883146, N76740, |
| | | | | | AI287535, AL045328, W68311, |
| | | | | | AA022994, AL042898, AL038838, |
| | | | | | AL037343, AL038983, AL037436, |
| | | | | | AI142134, AL037335, AL037323, |
| | | | | | AL038761, AL047037, AL037443, |
| | | | | | AL037727, R67930, AL038532, AL047012, |
| | | | | | AL040193, AL044125, AL044162, |
| | | | | | AL037435, AL041347, AL040621, |
| | | | | | AL043538, AL043496, AL040464, |
| | | | | | AL038822, AL040463, AL047163, |
| | | | | | AL047170, AL041238, AL041324, |
| | | | | | AL044186, AL044037, AL040617, |
| | | | | | AL043923, AL043814, AL047219, |
| | | | | | AL041635, AL040294, AL043845, |
| | | | | | AL041098, AL044064, AL040625, |
| | | | | | AL041459, AL041577, AL045684, |
| | | | | | AL041752, AL040510, AL046850, |
| | | | | | AL040768, AL043467, AL047183, |
| | | | | | AL046994, AL040052, AL046914, |
| | | | | | AL043677, AL041096, AL040839, |
| | | | | | AL043492, AL041602, AL044074, |
| | | | | | AL041730, AL041523, AL043627, |
| | | | | | AL041374, AL043848, AL043570, |
| | | | | | AL041163, AL040444, AL046442, |
| | | | | | AL041133, AL045753, AL040576, |
| | | | | | AL045327, AL042135, AL040322, |
| | | | | | AL039316, AL045671, AL041246, |
| | | | | | AL041358, AL040472, AL040119, |
| | | | | | AL041296, AL046392, AL041955, |
| | | | | | AL044272, AL041086, AL044258, |
| | | | | | AL041168, AL042096, AL039360, |
| | | | | | AL041159, AL047057, AL045920, |
| | | | | | AL040148, AL041346, AL038745, |
| | | | | | AL040458, AL044187, AL041292, |
| | | | | | AL041233, AL045990, AL134110, |
| | | | | | AL040075, AL041142, AL040571, |
| | | | | | AL040332, AL037295, AL039643, |
| | | | | | AL049018, AL041197, AL040529, |
| | | | | | AL039338, AL079878, AL046330, |
| | | | | | AL040745, AL040370, AL044274, |
| | | | | | AL040128, AL040149, AL041277, |
| | | | | | AL045817, AL047036, AL040553, |
| | | | | | AL040342, AL041186, AL037341, |
| | | | | | AL040414, AL039744, AL044199, |
| | | | | | AL040285, AL040155, AL079852, |
| | | | | | AL040091, AL044165, AL041131, |
| | | | | | AL040090, AL041051, AL040168, |
| | | | | | AL043775, AL043941, AL045989, |
| | | | | | AL044201, AL040253, AL041227, |
| | | | | | AL037279, AL040082, AI547295, |
| | | | | | AL043444, AL046327, AF112455, X84209, |
| | | | | | D90173, Y07690, Y07691, X84210, |
| | | | | | D78018, D78017, AL133665, U57633, |
| | | | | | X13167, D78019, X51486, X68152, |
| | | | | | X68155, D90174, D90175, X68154, |
| | | | | | X68156, D78020, D90172, AR064707, |
| | | | | | AJ238010, AR066494, A58524, A58523, |
| | | | | | A93016, Z32836, AR062872, AR062873, |
| | | | | | I05558, A93923, A25909, AF082186, |
| | | | | | A60212, A60209, A60210, A60211, |
| | | | | | I08396, D50010, AJ244003, AJ244004, |
| | | | | | AJ244005, Y16359, I08389, X81969, |
| | | | | | A98767, A20702, A93963, A93964, |
| | | | | | I63120, AR062871, A43189, A43188, |
| | | | | | A20700, A98420, A98423, A98432, |
| | | | | | A98436, A98417, A98427, E03627, I48927, |
| | | | | | A35536, A35537, A02135, A04663, |
| | | | | | A02136, A04664, I84553, I84554, E17098, |
| | | | | | I06859, A18050, A23334, A75888, I70384, |
| | | | | | A60111, A23633, AR007512, E13740, |
| | | | | | A81878, AB025273, AR038855, A90655, |
| | | | | | D13316, A02712, A77094, A77095, |
| | | | | | A95051, AI8053, A64973, AR017907, |
| | | | | | I62368, D17247, AR031566, I00682, |
| | | | | | A11245, A11623, E00609, A11624, |
| | | | | | AI1178, E01007, I13349, A10361, D78345, |
| | | | | | D13509, AR043601, A22738, A85395, |
| | | | | | A70872, A85476, I44681, X83865, I19525, |
| | | | | | A84772, A84776, A84773, A84775, |
| | | | | | A84774, AR067731, AR037157, |
| | | | | | AR054109, AR067732, I15718, A93916, |
| | | | | | M28262, AF149828, I03331, I15717, |
| | | | | | S60422, I01995, A02710, E12615, |
| | | | | | AR035193, A92133, E14304, A07700, |
| | | | | | AI3392, AI3393, AR031488, I13521, |
| | | | | | I52048, A27396, I25027, AR027100, |
| | | | | | I49890, I44531, I28266, I21869, 126929, |
| | | | | | I44515, I26928, I26930, I26927, A91965, |
| | | | | | I44516, A70040, E16678, A82653, I08051, |
| | | | | | E16636, A93931, AL133053, A86792, |
| | | | | | A58522, A24783, A24782, AJ230935, |
| | | | | | A95117, A06631, A91750, AR063812, |
| | | | | | I08395, AJ244007, AJ230972, A22734, |
| | | | | | I60241, I60242, AJ231028, Y14219, |
| | | | | | I66495, 166494, AJ230902, AR051957, |
| | | | | | I66498, I66497, I66496, I66486, and |
| | | | | | I66487. |
| HHEZD80 | 84 | 921160 | 1-721 | 15-735 | AA017601, AA490754, AA206861, |
| | | | | | AA243556, AI014264, AC005410, |
| | | | | | AC022892, AC005410, and AC005410. |
| HULCB61 | 85 | 923149 | 1-834 | 15-848 | AI359499, AA308980, F00663, X55126, |
| | | | | | AC016771, AC016771, AC048382, |
| | | | | | AC048382, and AC048382. |
| HDMBB39 | 86 | 930905 | 1-964 | 15-978 | AA972523, AL134843, and AB023221. |
| HKADW47 | 87 | 943680 | 1-742 | 15-756 | U87801, AW392670, AL119324, |
| | | | | | AL119319, AL119335, U46350, U46351, |
| | | | | | AL119457, AL119484, AL119391, |
| | | | | | U46347, AW372827, AL119522, |
| | | | | | AL119439, AW384394, AW363220, |
| | | | | | Z99396, AL119363, AL119497, U46349, |
| | | | | | AL119355, AL119444, AL134528, |
| | | | | | AL119443, U46341, AL119483, |
| | | | | | AL119341, AL037205, AL119401, |
| | | | | | U46346, AL119396, AL134902, |
| | | | | | AL119496, AL042450, AL134531, |
| | | | | | AL119418, AL134518, AL119399, |
| | | | | | U46345, AL134538, AL134524, |
| | | | | | AL039912, AL042544, AL042614, |
| | | | | | AL042542, AL043019, AL134542, |
| | | | | | AL042984, AL042965, AL042975, |
| | | | | | AL043029, AL043003, AL042551, |
| | | | | | AL119464, AL133572, AB026436, |
| | | | | | A81671, AR066494, AR054110, |
| | | | | | AR060234, and AR069079. |
| HUCOF56 | 88 | 951657 | 1-594 | 15-608 | AI201243, AI978950, AW007185, |
| | | | | | AA595524, AI350861, AI032773, |
| | | | | | AW392899, AI566855, AW392831, |
| | | | | | AI031905, AA369134, AA527382, |
| | | | | | AI334094, AI027903, AI393703, |
| | | | | | AA805831, AI144022, AI186734, |
| | | | | | AI658592, AI183913, AI184479, |
| | | | | | AW301943, AW004751, N74677, |
| | | | | | AA887882, W05039, AW384423, |
| | | | | | AA448545, AI969489, AA889305, |
| | | | | | W88772, AA654726, AA782056, |
| | | | | | AI590482, AW389553, AA449365, |
| | | | | | AA234979, AI128591, Z97184, AB022537, |
| | | | | | M65256, M65255, AF110520, AF100956, |
| | | | | | AI826496, AB022537, AB022537, |
| | | | | | AC040962, AC040962, and AC040962. |
| HHATZ53 | 89 | 966374 | 1-2286 | 15-2300 | AI674134, AI140776, AI140772, |
| | | | | | AW024863, AW188470, AA628928, |
| | | | | | AA953817, AI075759, AI826396, |
| | | | | | AW274711, R59255, R59197, AI266146, |
| | | | | | AI051483, AI292169, AI536060, R42938, |
| | | | | | AA972797, H79432, H79318, R17601, |
| | | | | | AA494524, AI262720, R18043, R13366, |
| | | | | | AA745596, AL044563, R40881, N87850, |
| | | | | | AA916299, AC008151, and AF205278. |
| HCGLD61 | 90 | 974217 | 1-1140 | 15-1154 | AC011953, AC016327, AC027300, |
| | | | | | AC022231, AC016327, AC016327, |
| | | | | | AC048342, AC048342, AC023881, |
| | | | | | AC023881, AC025036, and AL121656. |

[0099] TABLE 4

| Code | Description | Tissue | Organ | Cell Line | Disease | Vector |
|---|---|---|---|---|---|---|
| AR022 | a_Heart | a_Heart | | | | |
| AR023 | a_Liver | a_Liver | | | | |
| AR024 | a_mammary gland | a_mammary gland | | | | |
| AR025 | a_Prostate | a_Prostate | | | | |
| AR026 | a_small intestine | a_small intestine | | | | |
| AR027 | a_Stomach | a_Stomach | | | | |
| AR028 | Blood B cells | Blood B cells | | | | |
| AR029 | Blood B cells activated | Blood B cells | | | | |
| | | activated | | | | |
| AR030 | Blood B cells resting | Blood B cells | | | | |
| | | resting | | | | |
| AR031 | Blood T cells activated | Blood T cells | | | | |
| | | activated | | | | |
| AR032 | Blood T cells resting | Blood T cells resting | | | | |
| AR033 | brain | brain | | | | |
| AR034 | breast | breast | | | | |
| AR035 | breast cancer | breast cancer | | | | |
| AR036 | Cell Line CAOV3 | Cell Line CAOV3 | | | | |
| AR037 | cell line PA-1 | cell line PA-1 | | | | |
| AR038 | cell line transformed | cell line transformed | | | | |
| AR039 | colon | colon | | | | |
| AR040 | colon (9808co65R) | colon (9808co65R) | | | | |
| AR041 | colon (9809co15) | colon (9809co15) | | | | |
| AR042 | colon cancer | colon cancer | | | | |
| AR043 | colon cancer (9808co64R) | colon cancer | | | | |
| | | (9808co64R) | | | | |
| AR044 | colon cancer 9809co14 | colon cancer | | | | |
| | | 9809co14 | | | | |
| AR045 | corn clone 5 | corn clone 5 | | | | |
| AR046 | corn clone 6 | corn clone 6 | | | | |
| AR047 | corn clone2 | corn clone2 | | | | |
| AR048 | corn clone3 | corn clone3 | | | | |
| AR049 | Corn Clone4 | Corn Clone4 | | | | |
| AR050 | Donor II B Cells 24 hrs | Donor II B Cells | | | | |
| | | 24 hrs | | | | |
| AR051 | Donor II B Cells 72 hrs | Donor II B Cells | | | | |
| | | 72 hrs | | | | |
| AR052 | Donor II B-Cells 24 hrs. | Donor II B-Cells 24 | | | | |
| | | hrs. | | | | |
| AR053 | Donor II B-Cells 72 hrs | Donor II B-Cells | | | | |
| | | 72 hrs | | | | |
| AR054 | Donor II Resting B Cells | Donor II Resting B | | | | |
| | | cells | | | | |
| AR055 | Heart | Heart | | | | |
| AR056 | Human Lung (clonetech) | Human Lung | | | | |
| | | (clonetech) | | | | |
| AR057 | Human Mammary | Human Mammary | | | | |
| | (clontech) | (clontech) | | | | |
| AR058 | Human Thymus | Human Thymus | | | | |
| | (clonetech) | (clonetech) | | | | |
| AR059 | Jurkat (unstimulated) | Jurkat | | | | |
| | | (unstimulated) | | | | |
| AR060 | Kidney | Kidney | | | | |
| AR061 | Liver | Liver | | | | |
| AR062 | Liver (Clontech) | Liver (Clontech) | | | | |
| AR063 | Lymphocytes chronic | Lymphocytes | | | | |
| | lymphocytic leukaemia | chronic lymphocytic | | | | |
| | | leukaemia | | | | |
| AR064 | Lymphocytes diffuse large | Lymphocytes | | | | |
| | B cell lymphoma | diffuse large B cell | | | | |
| | | lymphoma | | | | |
| AR065 | Lymphocytes follicular | Lymphocytes | | | | |
| | lymphoma | follicular lymphoma | | | | |
| AR066 | normal breast | normal breast | | | | |
| AR067 | Normal Ovarian | Normal Ovarian | | | | |
| | (4004901) | (4004901) | | | | |
| AR068 | Normal Ovary 9508G045 | Normal Ovary | | | | |
| | | 9508G045 | | | | |
| AR069 | Normal Ovary 9701G208 | Normal Ovary | | | | |
| | | 9701G208 | | | | |
| AR070 | Normal Ovary 9806G005 | Normal Ovary | | | | |
| | | 9806G005 | | | | |
| AR071 | Ovarian Cancer | Ovarian Cancer | | | | |
| AR072 | Ovarian Cancer | Ovarian Cancer | | | | |
| | (9702G001) | (9702G001) | | | | |
| AR073 | Ovarian Cancer | Ovarian Cancer | | | | |
| | (9707G029) | (9707G029) | | | | |
| AR074 | Ovarian Cancer | Ovarian Cancer | | | | |
| | (9804G011) | (9804G011) | | | | |
| AR075 | Ovarian Cancer | Ovarian Cancer | | | | |
| | (9806G019) | (9806G019) | | | | |
| AR076 | Ovarian Cancer | Ovarian Cancer | | | | |
| | (9807G017) | (9807G017) | | | | |
| AR077 | Ovarian Cancer | Ovarian Cancer | | | | |
| | (9809G001) | (9809G001) | | | | |
| AR078 | ovarian cancer 15799 | ovarian cancer | | | | |
| | | 15799 | | | | |
| AR079 | Ovarian Cancer | Ovarian Cancer | | | | |
| | 17717AID | 17717AID | | | | |
| AR080 | Ovarian Cancer | Ovarian Cancer | | | | |
| | 4004664B1 | 4004664B1 | | | | |
| AR081 | Ovarian Cancer | Ovarian Cancer | | | | |
| | 4005315A1 | 4005315A1 | | | | |
| AR082 | ovarian cancer 94127303 | ovarian cancer | | | | |
| | | 94127303 | | | | |
| AR083 | Ovarian Cancer 96069304 | Ovarian Cancer | | | | |
| | | 96069304 | | | | |
| AR084 | Ovarian Cancer 9707G029 | Ovarian Cancer | | | | |
| | | 9707G029 | | | | |
| AR085 | Ovarian Cancer 9807G045 | Ovarian Cancer | | | | |
| | | 9807G045 | | | | |
| AR086 | ovarian cancer 9809G001 | ovarian cancer | | | | |
| | | 9809G001 | | | | |
| AR087 | Ovarian Cancer | Ovarian Cancer | | | | |
| | 9905C032RC | 9905C032RC | | | | |
| AR088 | Ovarian cancer 9907 C00 | Ovarian cancer 9907 | | | | |
| | 3rd | C00 3rd | | | | |
| AR089 | Prostate | Prostate | | | | |
| AR090 | Prostate (clonetech) | Prostate (clonetech) | | | | |
| AR091 | prostate cancer | prostate cancer | | | | |
| AR092 | prostate cancer #15176 | prostate cancer | | | | |
| | | #15176 | | | | |
| AR093 | prostate cancer #15509 | prostate cancer | | | | |
| | | #15509 | | | | |
| AR094 | prostate cancer #15673 | prostate cancer | | | | |
| | | #15673 | | | | |
| AR095 | Small Intestine (Clontech) | Small Intestine | | | | |
| | | (Clontech) | | | | |
| AR096 | Spleen | Spleen | | | | |
| AR097 | Thymus T cells activated | Thymus T cells | | | | |
| | | activated | | | | |
| AR098 | Thymus T cells resting | Thymus T cells | | | | |
| | | resting | | | | |
| AR099 | Tonsil | Tonsil | | | | |
| AR100 | Tonsil geminal center | Tonsil geminal | | | | |
| | centroblast | center centroblast | | | | |
| AR101 | Tonsil germinal center B | Tonsil germinal | | | | |
| | cell | center B cell | | | | |
| AR102 | Tonsil lymph node | Tonsil lymph node | | | | |
| AR103 | Tonsil memory B cell | Tonsil memory B | | | | |
| | | cell | | | | |
| AR104 | Whole Brain | Whole Brain | | | | |
| AR105 | Xenograft ES-2 | Xenograft ES-2 | | | | |
| AR106 | Xenograft SW626 | Xenograft SW626 | | | | |
| H0002 | Human Adult Heart | Human Adult Heart | Heart | | | Uni-ZAP |
| | | | | | | XR |
| H0008 | Whole 6 Week Old | | | | | Uni-ZAP |
| | Embryo | | | | | XR |
| H0009 | Human Fetal Brain | | | | | Uni-ZAP |
| | | | | | | XR |
| H0011 | Human Fetal Kidney | Human Fetal Kidney | Kidney | | | Uni-ZAP |
| | | | | | | XR |
| H0012 | Human Fetal Kidney | Human Fetal Kidney | Kidney | | | Uni-ZAP |
| | | | | | | XR |
| H0013 | Human 8 Week Whole | Human 8 Week Old | Embryo | | | Uni-ZAP |
| | Embryo | Embryo | | | | XR |
| H0014 | Human Gall Bladder | Human Gall Bladder | Gall Bladder | | | Uni-ZAP |
| | | | | | | XR |
| H0022 | Jurkat Cells | Jurkat T-Cell Line | | | | Lambda |
| | | | | | | ZAP II |
| H0024 | Human Fetal Lung III | Human Fetal Lung | Lung | | | Uni-ZAP |
| | | | | | | XR |
| H0028 | Human Old Ovary | Human Old Ovary | Ovary | | | pBluescript |
| H0030 | Human Placenta | | | | | Uni-ZAP |
| | | | | | | XR |
| H0031 | Human Placenta | Human Placenta | Placenta | | | Uni-ZAP |
| | | | | | | XR |
| H0032 | Human Prostate | Human Prostate | Prostate | | | Uni-ZAP |
| | | | | | | XR |
| H0036 | Human Adult Small | Human Adult Small | Small Int. | | | Uni-ZAP |
| | Intestine | Intestine | | | | XR |
| H0037 | Human Adult Small | Human Adult Small | Small Int. | | | pBluescript |
| | Intestine | Intestine | | | | |
| H0038 | Human Testes | Human Testes | Testis | | | Uni-ZAP |
| | | | | | | XR |
| H0039 | Human Pancreas Tumor | Human Pancreas | Pancreas | | disease | Uni-ZAP |
| | | Tumor | | | | XR |
| H0040 | Human Testes Tumor | Human Testes | Testis | | disease | Uni-ZAP |
| | | Tumor | | | | XR |
| H0041 | Human Fetal Bone | Human Fetal Bone | Bone | | | Uni-ZAP |
| | | | | | | XR |
| H0042 | Human Adult Pulmonary | Human Adult | Lung | | | Uni-ZAP |
| | | Pulmonary | | | | XR |
| H0046 | Human Endometrial | Human Endometrial | Uterus | | disease | Uni-ZAP |
| | Tumor | Tumor | | | | XR |
| H0050 | Human Fetal Heart | Human Fetal Heart | Heart | | | Uni-ZAP |
| | | | | | | XR |
| H0051 | Human Hippocampus | Human | Brain | | | Uni-ZAP |
| | | Hippocampus | | | | XR |
| H0052 | Human Cerebellum | Human Cerebellum | Brain | | | Uni-ZAP |
| | | | | | | XR |
| H0056 | Human Umbilical Vein, | Human Umbilical | Umbilical | | | Uni-ZAP |
| | Endo. remake | Vein Endothelial | vein | | | XR |
| | | Cells | | | | |
| H0057 | Human Fetal Spleen | | | | | Uni-ZAP |
| | | | | | | XR |
| H0059 | Human Uterine Cancer | Human Uterine | Uterus | | disease | Lambda |
| | | Cancer | | | | ZAP II |
| H0062 | Human Thymus | Human Thymus | Thymus | | | Uni-ZAP |
| | | | | | | XR |
| H0063 | Human Thymus | Human Thymus | Thymus | | | Uni-ZAP |
| | | | | | | XR |
| H0067 | Human left hemisphere, | Human Left | Brain | | | Lambda |
| | adult | Hemisphere, Adult | | | | ZAP II |
| H0068 | Human Skin Tumor | Human Skin Tumor | Skin | | disease | Uni-ZAP |
| | | | | | | XR |
| H0069 | Human Activated T-Cells | Activated T-Cells | Blood | Cell Line | | Uni-ZAP |
| | | | | | | XR |
| H0071 | Human Infant Adrenal | Human Infant | Adrenal | | | Uni-ZAP |
| | Gland | Adrenal Gland | gland | | | XR |
| H0074 | Human Platelets | Human Platelets | Blood | Cell Line | | Uni-ZAP |
| | | | | | | XR |
| H0081 | Human Fetal Epithelium | Human Fetal Skin | Skin | | | Uni-ZAP |
| | (Skin) | | | | | XR |
| H0083 | HUMAN JURKAT | Jurkat Cells | | | | Uni-ZAP |
| | MEMBRANE BOUND | | | | | XR |
| | POLYSOMES | | | | | |
| H0085 | Human Colon | Human Colon | | | | Lambda |
| | | | | | | ZAP II |
| H0087 | Human Thymus | Human Thymus | | | | pBluescript |
| H0090 | Human T-Cell Lymphoma | T-Cell Lymphoma | T-Cell | | disease | Uni-ZAP |
| | | | | | | XR |
| H0099 | Human Lung Cancer, | Human Lung Cancer | Lung | | | pBluescript |
| | subtracted | | | | | |
| H0100 | Human Whole Six Week | Human Whole Six | Embryo | | | Uni-ZAP |
| | Old Embryo | Week Old Embryo | | | | XR |
| H0105 | Human Fetal Heart, | Human Fetal Heart | Heart | | | pBluescript |
| | subtracted | | | | | |
| H0107 | Human Infant Adrenal | Human Infant | Adrenal | | | pBluescript |
| | Gland, subtracted | Adrenal Gland | gland | | | |
| H0108 | Human Adult Lymph | Human Adult | Lymph Node | | | Uni-ZAP |
| | Node, subtracted | Lymph Node | | | | XR |
| H0110 | Human Old Ovary, | Human Old Ovary | Ovary | | | pBluescript |
| | subtracted | | | | | |
| H0111 | Human Placenta, | Human Placenta | Placenta | | | pBluescript |
| | subtracted | | | | | |
| H0122 | Human Adult Skeletal | Human Skeletal | Sk Muscle | | | Uni-ZAP |
| | Muscle | Muscle | | | | XR |
| H0123 | Human Fetal Dura Mater | Human Fetal Dura | Brain | | | Uni-ZAP |
| | | Mater | | | | XR |
| H0124 | Human | Human | Sk Muscle | | disease | Uni-ZAP |
| | Rhabdomyosarcoma | Rhabdomyosarcoma | | | | XR |
| H0125 | Cem cells cyclohexamide | Cyclohexamide | Blood | Cell Line | | Uni-ZAP |
| | treated | Treated Cem, Jurkat, | | | | XR |
| | | Raji, and Supt | | | | |
| H0130 | LNCAP untreated | LNCAP Cell Line | Prostate | Cell Line | | Uni-ZAP |
| | | | | | | XR |
| H0131 | LNCAP + o.3 nM R1881 | LNCAP Cell Line | Prostate | Cell Line | | Uni-ZAP |
| | | | | | | XR |
| H0134 | Raji Cells, cyclohexamide | Cyclohexamide | Blood | Cell Line | | Uni-ZAP |
| | treated | Treated Cem, Jurkat, | | | | XR |
| | | Raji, and Supt | | | | |
| H0135 | Human Synovial Sarcoma | Human Synovial | Synovium | | | Uni-ZAP |
| | | Sarcoma | | | | XR |
| H0136 | Supt Cells, cyclohexamide | Cyclohexamide | Blood | Cell Line | | Uni-ZAP |
| | treated | Treated Cem, Jurkat, | | | | XR |
| | | Raji, and Supt | | | | |
| H0144 | Nine Week Old Early | 9 Wk Old Early | Embryo | | | Uni-ZAP |
| | Stage Human | Stage Human | | | | XR |
| H0150 | Human Epididymus | Epididymis | Testis | | | Uni-ZAP |
| | | | | | | XR |
| H0156 | Human Adrenal Gland | Human Adrenal | Adrenal | | disease | Uni-ZAP |
| | Tumor | Gland Tumor | Gland | | | XR |
| H0163 | Human Synovium | Human Synovium | Synovium | | | Uni-ZAP |
| | | | | | | XR |
| H0165 | Human Prostate Cancer, | Human Prostate | Prostate | | disease | Uni-ZAP |
| | Stage B2 | Cancer, stage B2 | | | | XR |
| H0166 | Human Prostate Cancer, | Human Prostate | Prostate | | disease | Uni-ZAP |
| | Stage B2 fraction | Cancer, stage B2 | | | | XR |
| H0168 | Human Prostate Cancer, | Human Prostate | Prostate | | disease | Uni-ZAP |
| | Stage C | Cancer, stage C | | | | XR |
| H0169 | Human Prostate Cancer, | Human Prostate | Prostate | | disease | Uri-ZAP |
| | Stage C fraction | Cancer, stage C | | | | XR |
| H0170 | 12 Week Old Early Stage | Twelve Week Old | Embryo | | | Uni-ZAP |
| | Human | Early Stage Human | | | | XR |
| H0171 | 12 Week Old Early Stage | Twelve Week Old | Embryo | | | Uni-ZAP |
| | Human, II | Early Stage Human | | | | XR |
| H0172 | Human Fetal Brain, | Human Fetal Brain | Brain | | | Lambda |
| | random primed | | | | | ZAP II |
| H0176 | CAMA1Ee Cell Line | CAMA1Ee Cell | Breast | Cell Line | | Uni-ZAP |
| | | Line | | | | XR |
| H0178 | Human Fetal Brain | Human Fetal Brain | Brain | | | Uni-ZAP |
| | | | | | | XR |
| H0179 | Human Neutrophil | Human Neutrophil | Blood | Cell Line | | Uni-ZAP |
| | | | | | | XR |
| H0188 | Human Normal Breast | Human Normal | Breast | | | Uni-ZAP |
| | | Breast | | | | XR |
| H0189 | Human Resting | Human | Blood | Cell Line | | Uni-ZAP |
| | Macrophage | Macrophage/Mono- | | | | XR |
| | | cytes | | | | |
| H0190 | Human Activated | Human | Blood | Cell Line | | Uni-ZAP |
| | Macrophage (LPS) | Macrophage/Mono- | | | | XR |
| | | cytes | | | | |
| H0194 | Human Cerebellum, | Human Cerebellum | Brain | | | pBluescript |
| | subtracted | | | | | |
| H0196 | Human Cardiomyopathy, | Human | Heart | | | Uni-ZAP |
| | subtracted | Cardiomyopathy | | | | XR |
| H0201 | Human Hippocampus, | Human | Brain | | | pBluescript |
| | subtracted | Hippocampus | | | | |
| H0208 | Early Stage Human Lung, | Human Fetal Lung | Lung | | | pBluescript |
| | subtracted | | | | | |
| H0211 | Human | Human Prostate | Prostate | | | pBluescript |
| | Prostate, differential | | | | | |
| | expression | | | | | |
| H0212 | Human Prostate, | Human Prostate | Prostate | | | pBluescript |
| | subtracted | | | | | |
| H0213 | Human Pituitary, | Human Pituitary | | | | Uni-ZAP |
| | subtracted | | | | | XR |
| H0228 | C7MCF7 cell line, | C7MCF7 Cell Line, | Breast | Cell Line | | Uni-ZAP |
| | estrogen treated | estrogen treated | | | | XR |
| H0229 | Early Stage Human Brain, | Early Stage Human | Brain | | | Lambda |
| | random primed | Brain | | | | ZAPII |
| H0231 | Human Colon, subtraction | Human Colon | | | | pBluescript |
| H0233 | Human Fetal Heart, | Human Fetal Heart | Heart | | | pBluescript |
| | Differential (Adult- | | | | | |
| | Specific) | | | | | |
| H0244 | Human 8 Week Whole | Human 8 Week Old | Embryo | | | Uni-ZAP |
| | Embryo, subtracted | Embryo | | | | XR |
| H0250 | Human Activated | Human Monocytes | | | | Uni-ZAP |
| | Monocytes | | | | | XR |
| H0251 | Human Chondrosarcoma | Human | Cartilage | | disease | Uni-ZAP |
| | | Chondrosarcoma | | | | XR |
| H0252 | Human Osteosarcoma | Human | Bone | | disease | Uni-ZAP |
| | | Osteosarcoma | | | | XR |
| H0253 | Human adult testis, large | Human Adult Testis | Testis | | | Uni-ZAP |
| | inserts | | | | | XR |
| H0254 | Breast Lymph node cDNA | Breast Lymph Node | Lymph Node | | | Uni-ZAP |
| | library | | | | | XR |
| H0255 | breast lymph node CDNA | Breast Lymph Node | Lymph Node | | | Lambda |
| | library | | | | | ZAP II |
| H0257 | HL-60, PMA 4H | HL-60 Cells, PMA | Blood | Cell Line | | Uni-ZAP |
| | | stimulated 4H | | | | XR |
| H0261 | H. cerebellum, Enzyme | Human Cerebellum | Brain | | | Uni-ZAP |
| | subtracted | | | | | XR |
| H0263 | human colon cancer | Human Colon | Colon | | disease | Lambda |
| | | Cancer | | | | ZAP II |
| H0264 | human tonsils | Human Tonsil | Tonsil | | | Uni-ZAP |
| | | | | | | XR |
| H0265 | Activated T-Cell | T-Cells | Blood | Cell Line | | Uni-ZAP |
| | (12 hs)/Thiouridine | | | | | XR |
| | labelledEco | | | | | |
| H0266 | Human Microvascular | HMEC | Vein | Cell Line | | Lambda |
| | Endothelial Cells, fract. A | | | | | ZAP II |
| H0268 | Human Umbilical Vein | HUVE Cells | Umbilical | Cell Line | | Lambda |
| | Endothelial Cells, fract. A | | vein | | | ZAP II |
| H0270 | HPAS (human pancreas, | Human Pancreas | Pancreas | | | Uni-ZAP |
| | subtracted) | | | | | XR |
| H0271 | Human Neutrophil, | Human Neutrophil - | Blood | Cell Line | | Uni-ZAP |
| | Activated | Activated | | | | XR |
| H0272 | HUMAN TONSILS, | Human Tonsil | Tonsil | | | Uni-ZAP |
| | FRACTION 2 | | | | | XR |
| H0286 | Human OB MG63 treated | Human | Bone | Cell Line | | Uni-ZAP |
| | (10 nM E2) fraction I | Osteoblastoma | | | | XR |
| | | MG63 cell line | | | | |
| H0292 | Human OB HOS treated | Human | Bone | Cell Line | | Uni-ZAP |
| | (10 nM E2) fraction I | Osteoblastoma HOS | | | | XR |
| | | cell line | | | | |
| H0294 | Amniotic Cells - TNF | Amniotic Cells - | Placenta | Cell Line | | Uni-ZAP |
| | induced | TNF induced | | | | XR |
| H0295 | Amniotic Cells - Primary | Amniotic Cells - | Placenta | Cell Line | | Uni-ZAP |
| | Culture | Primary Culture | | | | XR |
| H0305 | CD34 positive cells (Cord | CD34 Positive Cells | Cord Blood | | | ZAP Express |
| | Blood) | | | | | |
| H0306 | CD34 depleted Buffy Coat | CD34 Depleted | Cord Blood | | | ZAP Express |
| | (Cord Blood) | Buffy Coat (Cord | | | | |
| | | Blood) | | | | |
| H0309 | Human Chronic Synovitis | Synovium, Chronic | Synovium | | disease | Uni-ZAP |
| | | Synovitis/ | | | | XR |
| | | Osteoarthritis | | | | |
| H0316 | HUMAN STOMACH | Human Stomach | Stomach | | | Uni-ZAP |
| | | | | | | XR |
| H0318 | HUMAN B CELL | Human B Cell | Lymph Node | | disease | Uni-ZAP |
| | LYMPHOMA | Lymphoma | | | | XR |
| H0327 | human corpus colosum | Human Corpus | Brain | | | Uni-ZAP |
| | | Callosum | | | | XR |
| H0328 | human ovarian cancer | Ovarian Cancer | Ovary | | disease | Uni-ZAP |
| | | | | | | XR |
| H0329 | Dermatofibrosarcoma | Dermatofibrosarcoma | Skin | | disease | Uni-ZAP |
| | Protuberance | Protuberans | | | | XR |
| H0331 | Hepatocellular Tumor | Hepatocellular | Liver | | disease | Lambda |
| | | Tumor | | | | ZAP II |
| H0333 | Hemangiopencytoma | Hemangiopericytoma | Blood vessel | | disease | Lambda |
| | | | | | | ZAP II |
| H0334 | Kidney cancer | Kidney Cancer | Kidney | | disease | Uni-ZAP |
| | | | | | | XR |
| H0341 | Bone Marrow Cell Line | Bone Marrow Cell | Bone Marrow | Cell Line | | Uni-ZAP |
| | (RS4;11) | Line RS4;11 | | | | XR |
| H0343 | stomach cancer (human) | Stomach Cancer - | | | disease | Uni-ZAP |
| | | 5383A (human) | | | | XR |
| H0345 | SKIN | Skin - 4000868H | Skin | | | Uni-ZAP |
| | | | | | | XR |
| H0351 | Glioblastoma | Glioblastoma | Brain | | disease | Uni-ZAP |
| | | | | | | XR |
| H0352 | wilm's tumor | Wilm's Tumor | | | disease | Uni-ZAP |
| | | | | | | XR |
| H0354 | Human Leukocytes | Human Leukocytes | Blood | Cell Line | | pCMV Sport |
| | | | | | | 1 |
| H0356 | Human Kidney | Human Kidney | Kidney | | | pCMV Sport |
| | | | | | | 1 |
| H0357 | H. Normalized Fetal | Human Fetal Liver | Liver | | | Uni-ZAP |
| | Liver, II | | | | | XR |
| H0360 | Hemangiopericytoma | Hemangiopericytoma | | | disease | |
| H0361 | Human rejected kidney | Human Rejected | | | disease | pBluescript |
| | | Kidney | | | | |
| H0369 | H. Atrophic Endometrium | Atrophic | | | | Uni-ZAP |
| | | Endometrium and | | | | XR |
| | | myometrium | | | | |
| H0370 | H. Lymph node breast | Lymph node with | | | disease | Uni-ZAP |
| | Cancer | Met. Breast Cancer | | | | XR |
| H0373 | Human Heart | Human Adult Heart | Heart | | | pCMV Sport |
| | | | | | | 1 |
| H0374 | Human Brain | Human Brain | | | | pCMV Sport |
| | | | | | | 1 |
| H0375 | Human Lung | Human Lung | | | | pCMV Sport |
| | | | | | | 1 |
| H0376 | Human Spleen | Human Adult | Spleen | | | pCMV Sport |
| | | Spleen | | | | 1 |
| H0383 | Human Prostate BPH, re- | Human Prostate | | | | Uni-ZAP |
| | excision | BPH | | | | XR |
| H0390 | Human Amygdala | Human Amygdala | | | disease | pBluescript |
| | Depression, re-excision | Depression | | | | |
| H0392 | H. Meningima, M1 | Human Meningima | brain | | | pSport1 |
| H0393 | Fetal Liver, subtraction II | Human Fetal Liver | Liver | | | pBluescript |
| H0402 | CD34 depleted Buffy Coat | CD34 Depleted | Cord Blood | | | ZAP Express |
| | (Cord Blood), re-excision | Buffy Coat (Cord | | | | |
| | | Blood) | | | | |
| H0409 | H. Striatum Depression, | Human Brain, | Brain | | | pBluescript |
| | subtracted | Striatum Depression | | | | |
| H0411 | H Female Bladder, Adult | Human Female | Bladder | | | pSport1 |
| | | Adult Bladder | | | | |
| H0412 | Human umbilical vein | HUVE Cells | Umbilical | Cell Line | | pSport1 |
| | endothelial cells, IL-4 | | vein | | | |
| | induced | | | | | |
| H0413 | Human Umbilical Vein | HUVE Cells | Umbilical | Cell Line | | pSport1 |
| | Endothelial Cells, | | vein | | | |
| | uninduced | | | | | |
| H0416 | Human Neutrophils, | Human Neutrophil - | Blood | Cell Line | | pBluescript |
| | Activated, re-excision | Activated | | | | |
| H0421 | Human Bone Marrow, re- | Bone Marrow | | | | pBluescript |
| | excision | | | | | |
| H0422 | T-Cell PHA 16 hrs | T-Cells | Blood | Cell Line | | pSport1 |
| H0423 | T-Cell PHA 24 hrs | T-Cells | Blood | Cell Line | | pSport1 |
| H0424 | Human Pituitary, subt IX | Human Pituitary | | | | pBluescript |
| H0427 | Human Adipose | Human Adipose, left | | | | pSport1 |
| | | hiplipoma | | | | |
| H0428 | Human Ovary | Human Ovary | Ovary | | | pSport1 |
| | | Tumor | | | | |
| H0431 | H. Kidney Medulla, re- | Kidney medulla | Kidney | | | pBluescript |
| | excision | | | | | |
| H0432 | H. Kidney Pyramid | Kidney pyramids | Kidney | | | pBluescript |
| H0433 | Human Umbilical Vein | HUVE Cells | Umbilical | Cell Line | | pBluescript |
| | Endothelial cells, frac B, | | vein | | | |
| | re-excision | | | | | |
| H0435 | Ovarian Tumor 10-3-95 | Ovarian Tumor, | Ovary | | | pCMV Sport |
| | | OV350721 | | | | 2.0 |
| H0436 | Resting T-Cell Library, II | T-Cells | Blood | Cell Line | | pSport1 |
| H0437 | H Umbilical Vein | HUVE Cells | Umbilical | Cell Line | | Lambda |
| | Endothelial Cells, frac A, | | vein | | | ZAP II |
| | re-excision | | | | | |
| H0438 | H. Whole Brain #2, re- | Human Whole Brain | | | | ZAP Express |
| | excision | #2 | | | | |
| H0439 | Human Eosinophils | Eosinophils | | | | pBluescript |
| H0441 | H. Kidney Cortex, | Kidney cortex | Kidney | | | pBluescript |
| | subtracted | | | | | |
| H0444 | Spleen metastic melanoma | Spleen, Metastic | Spleen | | disease | pSport1 |
| | | malignant | | | | |
| | | melanoma | | | | |
| H0445 | Spleen, Chronic | Human Spleen, CLL | Spleen | | disease | pSport1 |
| | lymphocytic leukemia | | | | | |
| H0449 | CD34 + cell, I | CD34 positive cells | | | | pSport1 |
| H0450 | CD34 + cells, II | CD34 positive cells | | | | pCMV Sport |
| | | | | | | 2.0 |
| H0457 | Human Eosinophils | Human Eosinophils | | | | pSport1 |
| H0458 | CD34 + cell, I, frac II | CD34 positive cells | | | | pSport1 |
| H0459 | CD34 + cells, II, | CD34 positive cells | | | | pCMV Sport |
| | FRACTION 2 | | | | | 2.0 |
| H0478 | Salivary Gland, Lib 2 | Human Salivary | Salivary | | | pSport1 |
| | | Gland | gland | | | |
| H0479 | Salivary Gland, Lib 3 | Human Salivary | Salivary | | | pSport1 |
| | | Gland | gland | | | |
| H0483 | Breast Cancer cell line, | Breast Cancer Cell | | | | pSport1 |
| | MDA 36 | line, MDA 36 | | | | |
| H0484 | Breast Cancer Cell line, | Breast Cancer Cell | | | | pSport1 |
| | angiogenic | line, Angiogenic, | | | | |
| | | 36T3 | | | | |
| H0485 | Hodgkin's Lymphoma I | Hodgkin's | | | disease | pCMV Sport |
| | | Lymphoma I | | | | 2.0 |
| H0486 | Hodgkin's Lymphoma II | Hodgkin's | | | disease | pCMV Sport |
| | | Lymphoma II | | | | 2.0 |
| H0488 | Human Tonsils, Lib 2 | Human Tonsils | | | | pCMV Sport |
| | | | | | | 2.0 |
| H0492 | HL-60, RA 4h, Subtracted | HL-60 Cells, RA | Blood | Cell Line | | Uni-ZAP |
| | | stimulated for 4H | | | | XR |
| H0493 | HL-60, PMA 1d, | HL-60 Cells, PMA | Blood | Cell line | | Uni-ZAP |
| | subtracted | stimulated for 1 day | | | | XR |
| H0494 | Keratinocyte | Keratinocyte | | | | pCMV Sport |
| | | | | | | 2.0 |
| H0497 | HEL cell line | HEL cell line | | HEL | | pSport1 |
| | | | | 92.1.7 | | |
| H0505 | Human Astrocyte | Human Astrocyte | | | | pSport |
| H0506 | Ulcerative Colitis | Colon | Colon | | | pSport1 |
| H0509 | Liver, Hepatoma | Human Liver, | Liver | | disease | pCMV Sport |
| | | Hepatoma, patient 8 | | | | 3.0 |
| H0510 | Human Liver, normal | Human Liver, | Liver | | | pCMV Sport |
| | | normal, Patient #8 | | | | 3.0 |
| H0518 | pBMC stimulated w/ poly | pBMC stimulated | | | | pCMV Sport |
| | I/C | with poly I/C | | | | 3.0 |
| H0519 | NTERA2, control | NTERA2, | | | | pCMV Sport |
| | | Teratocarcinoma | | | | 3.0 |
| | | cell line | | | | |
| H0520 | NTERA2 + retinoic acid, | NTERA2, | | | | pSport1 |
| | 14 days | Teratocarcinoma | | | | |
| | | cell line | | | | |
| H0521 | Primary Dendritic Cells, | Primary Dendritic | | | | pCMV Sport |
| | lib 1 | cells | | | | 3.0 |
| H0522 | Primary Dendritic | Primary Dendritic | | | | pCMV Sport |
| | cells, frac 2 | cells | | | | 3.0 |
| H0529 | Myoloid Progenitor Cell | TF-1 Cell Line; | | | | pCMV Sport |
| | Line | Myoloid progenitor | | | | 3.0 |
| | | cell line | | | | |
| H0530 | Human Dermal | Human Dermal | | | | pSport1 |
| | Endothelial | Endothelial Cells; | | | | |
| | Cells, untreated | untreated | | | | |
| H0538 | Merkel Cells | Merkel cells | Lymph node | | | pSport1 |
| H0539 | Pancreas Islet Cell Tumor | Pancreas Islet Cell | Pancreas | | disease | pSport1 |
| | | Tumour | | | | |
| H0542 | T Cell helper I | Helper T cell | | | | pCMV Sport |
| | | | | | | 3.0 |
| H0543 | T cell helper II | Helper T cell | | | | pCMvSport |
| | | | | | | 3.0 |
| H0544 | Human endometrial | Human endometrial | | | | pCMV Sport |
| | stromal cells | stromal cells | | | | 3.0 |
| H0545 | Human endometrial | Human endometrial | | | | pCMV Sport |
| | stromal cells-treated with | stromal cells-treated | | | | 3.0 |
| | progesterone | with proge | | | | |
| H0546 | Human endometrial | Human endometrial | | | | pCMV Sport |
| | stromal cells-treated with | stromal cells-treated | | | | 3.0 |
| | estradiol | with estra | | | | |
| H0547 | NTERA2 teratocarcinoma | NTERA2, | | | | pSport1 |
| | cell line + retinoic acid (14 | Teratocarcinoma | | | | |
| | days) | cell line | | | | |
| H0549 | H. Epididiymus, caput & | Human | | | | Uni-ZAP |
| | corpus | Epididiymus, caput | | | | XR |
| | | and corpus | | | | |
| H0550 | H. Epididiymus, cauda | Human | | | | Uni-ZAP |
| | | Epididlymus, cauda | | | | XR |
| H0551 | Human Thymus Stromal | Human Thymus | | | | pCMV Sport |
| | Cells | Stromal Cells | | | | 3.0 |
| H0553 | Human Placenta | Human Placenta | | | | pCMV Sport |
| | | | | | | 3.0 |
| H0555 | Rejected Kidney, lib 4 | Human Rejected | Kidney | | disease | pCMV Sport |
| | | Kidney | | | | 3.0 |
| H0556 | Activated T- | T-Cells | Blood | Cell Line | | Uni-ZAP |
| | cell(12 h)/Thiouridine-re- | | | | | XR |
| | excision | | | | | |
| H0559 | HL-60, PMA 4H, re- | HL-60 Cells, PMA | Blood | Cell Line | | Uni-ZAP |
| | excision | stimulated 4H | | | | XR |
| H0560 | KMH2 | KMH2 | | | | pCMV Sport |
| | | | | | | 3.0 |
| H0561 | L428 | L428 | | | | pCMV Sport |
| | | | | | | 3.0 |
| H0565 | Human Fetal Brain, | Human Fetal Brain | | | | pCMV Sport |
| | normalized 100024F | | | | | 2.0 |
| H0570 | Human Fetal Brain, | Human Fetal Brain | | | | pCMV Sport |
| | normalized C500H | | | | | 2.0 |
| H0572 | Human Fetal Brain, | Human Fetal Brain | | | | pCMV Sport |
| | normalized AC5002 | | | | | 2.0 |
| H0574 | Hepatocellular Tumor; re- | Hepatocellular | Liver | | disease | Lambda |
| | excision | Tumor | | | | ZAP II |
| H0575 | Human Adult | Human Adult | Lung | | | Uni-ZAP |
| | Pulmonary; re-excision | Pulmonary | | | | XR |
| H0580 | Dendritic cells, pooled | Pooled dendritic | | | | pCMV Sport |
| | | cells | | | | 3.0 |
| H0581 | Human Bone Marrow, | Human Bone | Bone Marrow | | | pCMV Sport |
| | treated | Marrow | | | | 3.0 |
| H0583 | B Cell lymphoma | B Cell Lymphoma | B Cell | | disease | pCMV Sport |
| | | | | | | 3.0 |
| H0586 | Healing groin wound, 6.5 | healing groin | groin | | disease | pCMV Sport |
| | hours post incision | wound, 6.5 hours | | | | 3.0 |
| | | post incision - 2/ | | | | |
| H0587 | Healing groin wound; 7.5 | Groin-2/19/97 | groin | | disease | pCMV Sport |
| | hours post incision | | | | | 3.0 |
| H0590 | Human adult small | Human Adult Small | Small Int. | | | Uni-ZAP |
| | intestine, re-exciston | Intestine | | | | XR |
| H0591 | Human T-cell | T-Cell Lymphoma | T-Cell | | disease | Uni-ZAP |
| | lymphoma; re-excision | | | | | XR |
| H0592 | Healing groin wound - | HGS wound healing | | | disease | pCMV Sport |
| | zero hr post-incision | project; abdomen | | | | 3.0 |
| | (control) | | | | | |
| H0593 | Olfactory | Olfactory epithelium | | | | pCMV Sport |
| | epithelium; nasalcavity | from roof of left | | | | 3.0 |
| | | nasal cacit | | | | |
| H0594 | Human Lung Cancer; re- | Human Lung Cancer | Lung | | disease | Lambda |
| | excision | | | | | ZAP II |
| H0595 | Stomach cancer | Stomach Cancer - | | | disease | Uni-ZAP |
| | (human); re-excision | 5383A (human) | | | | XR |
| H0596 | Human Colon Cancer; re- | Human Colon | Colon | | | Lambda |
| | excision | Cancer | | | | ZAP II |
| H0597 | Human Colon; re-excision | Human Colon | | | | Lambda |
| | | | | | | ZAP II |
| H0598 | Human Stomach; re- | Human Stomach | Stomach | | | Uni-ZAP |
| | excision | | | | | XR |
| H0599 | Human Adult Heart; re- | Human Adult Heart | Heart | | | Uni-ZAP |
| | excision | | | | | XR |
| H0600 | Healing Abdomen | Abdomen | | | disease | pCMV Sport |
| | wound; 70 & 90 min post | | | | | 3.0 |
| | incision | | | | | |
| H0606 | Human Primary Breast | Human Primary | Breast | | disease | Uni-ZAP |
| | Cancer; re-excision | Breast Cancer | | | | XR |
| H0611 | H. Leukocytes, | H.Leukocytes | | | | pCMV Sport |
| | normalized cot 500 B | | | | | 1 |
| H0615 | Human Ovarian Cancer | Ovarian Cancer | Ovary | | disease | Uni-ZAP |
| | Reexcision | | | | | XR |
| H0616 | Human Testes, Reexcision | Human Testes | Testis | | | Uni-ZAP |
| | | | | | | XR |
| H0617 | Human Primary Breast | Human Primary | Breast | | disease | Uni-ZAP |
| | Cancer Reexcision | Breast Cancer | | | | XR |
| H0618 | Human Adult Testes, | Human Adult Testis | Testis | | | Uni-ZAP |
| | Large Inserts, Reexcision | | | | | XR |
| H0619 | Fetal Heart | Human Fetal Heart | Heart | | | Uni-ZAP |
| | | | | | | XR |
| H0620 | Human Fetal Kidney; | Human Fetal Kidney | Kidney | | | Uni-ZAP |
| | Reexcision | | | | | XR |
| H0622 | Human Pancreas Tumor; | Human Pancreas | Pancreas | | disease | Uni-ZAP |
| | Reexcision | Tumor | | | | XR |
| H0623 | Human Umbilical Vein; | Human Umbilical | Umbilical | | | Uni-ZAP |
| | Reexcision | Vein Endothelial | vein | | | XR |
| | | Cells | | | | |
| H0624 | 12 Week Early Stage | Twelve Week Old | Embryo | | | Uni-ZAP |
| | Human II; Re-excision | Early Stage Human | | | | XR |
| H0625 | Ku 812F Basophils Line | Ku 812F Basophils | | | | pSport1 |
| H0627 | Saos2 Cells; Vitamin D3 | Saos2 Cell Line; | | | | pSport1 |
| | Treated | Vitamin D3 Treated | | | | |
| H0628 | Human Pre-Differentiated | Human Pre- | | | | Uni-ZAP |
| | Adipocytes | Differentiated | | | | XR |
| | | Adipocytes | | | | |
| H0631 | Saos2, Dexamethosome | Saos2 Cell Line; | | | | pSport1 |
| | Treated | Dexamethosome | | | | |
| | | Treated | | | | |
| H0632 | Hepatocellular Tumor; re- | Hepatocellular | Liver | | | Lambda |
| | excision | Tumor | | | | ZAP II |
| H0633 | Lung Carcinoma A549 | TNFalpha activated | | | disease | pSport1 |
| | TNFalpha activated | A549--Lung | | | | |
| | | Carcinoma | | | | |
| H0634 | Human Testes Tumor, re- | Human Testes | Testis | | disease | Uni-ZAP |
| | excision | Tumor | | | | XR |
| H0635 | Human Activated T-Cells, | Activated T-Cells | Blood | Cell Line | | Uni-ZAP |
| | re-excision | | | | | XR |
| H0637 | Dendritic Cells From | Dentritic cells from | | | | pSport1 |
| | CD34 Cells | CD34 cells | | | | |
| H0638 | CD40 activated monocyte | CD40 activated | | | | pSport1 |
| | dendridic cells | monocyte dendridic | | | | |
| | | cells | | | | |
| H0641 | LPS activated derived | LPS activated | | | | pSport1 |
| | dendritic cells | monocyte derived | | | | |
| | | dendritic cells | | | | |
| H0644 | Human Placenta (re- | Human Placenta | Placenta | | | Uni-ZAP |
| | excision) | | | | | XR |
| H0646 | Lung, Cancer (4005313 | Metastatic | | | | pSport1 |
| | A3): Invasive Poorly | squamous cell lung | | | | |
| | Differentiated Lung | carcinoma, poorly di | | | | |
| | Adenocarcinoma, | | | | | |
| H0647 | Lung, Cancer (4005163 | Invasive poorly | | | disease | pSport1 |
| | B7): Invasive, Poorly Diff. | differentiated lung | | | | |
| | Adenocarcinoma, | adenocarcinoma | | | | |
| | Metastatic | | | | | |
| H0648 | Ovary, Cancer: (4004562 | Papillary Cstic | | | disease | pSport1 |
| | B6) Papillary Serous | neoplasm of low | | | | |
| | Cystic Neoplasm, Low | malignant potentia | | | | |
| | Malignant Pot | | | | | |
| H0649 | Lung, Normal: (4005313 | Normal Lung | | | | pSport1 |
| | B1) | | | | | |
| H0650 | B-Cells | B-Cells | | | | pCMV Sport |
| | | | | | | 3.0 |
| H0651 | Ovary, Normal: | Normal Ovary | | | | pSport1 |
| | (9805C040R) | | | | | |
| H0652 | Lung, Normal: (4005313 | Normal Lung | | | | pSport1 |
| | B1) | | | | | |
| H0653 | Stromal Cells | Stromal Cells | | | | pSport1 |
| H0656 | B-cells (unstimulated) | B-cells | | | | pSport1 |
| | | (unstimulated) | | | | |
| H0657 | B-cells (stimulated) | B-cells (stimulated) | | | | pSport1 |
| H0658 | Ovary, Cancer | 9809C332-Poorly | Ovary & | | disease | pSport1 |
| | (9809C332): Poorly | differentiate | Fallopian | | | |
| | differentiated | | Tubes | | | |
| | adenocarcinoma | | | | | |
| H0659 | Ovary, Cancer | Grade II Papillary | Ovary | | disease | pSport1 |
| | (15395A1F): Grade II | Carcinoma, Ovary | | | | |
| | Papillary Carcinoma | | | | | |
| H0660 | Ovary, Cancer | Poorly differentiated | | | disease | pSport1 |
| | (15799A1F) Poorly | carcinoma, ovary | | | | |
| | differentiated carcinoma | | | | | |
| H0661 | Breast, Cancer: (4004943 | Breast cancer | | | disease | pSport1 |
| | A5) | | | | | |
| H0662 | Breast, Normal: | Normal Breast - | Breast | | | pSport1 |
| | (4005522B2) | #4005522(B2) | | | | |
| H0663 | Breast, Cancer: (4005522 | Breast Cancer - | Breast | | disease | pSport1 |
| | A2) | #4005522(A2) | | | | |
| H0664 | Breast, Cancer: | Breast Cancer | Breast | | disease | pSport1 |
| | (9806C012R) | | | | | |
| H0665 | Stromal cells 3.88 | Stromal cells 3.88 | | | | pSport1 |
| H0666 | Ovary, Cancer: (4004332 | Ovarian Cancer, | | | disease | pSport1 |
| | A2) | Sample | | | | |
| | | #4004332A2 | | | | |
| H0667 | Stromal cells(HBM3.18) | Stromal cell(HBM | | | | pSport1 |
| | | 3.18) | | | | |
| H0668 | stromal cell clone 2.5 | stromal cell clone | | | | pSport1 |
| | | 2.5 | | | | |
| H0670 | Ovary, Cancer(4004650 | Ovarian Cancer - | | | | pSport1 |
| | A3): Well-Differentiated | 4004650A3 | | | | |
| | Micropapillary Serous | | | | | |
| | Carcinoma | | | | | |
| H0671 | Breast, Cancer | Breast Cancer- | | | | pSport1 |
| | (9802C02OE) | Sample # | | | | |
| | | 9802C02OE | | | | |
| H0672 | Ovary, Cancer (4004576 | Ovarian | Ovary | | | pSport1 |
| | A8) | Cancer(4004576A8) | | | | |
| H0673 | Human Prostate Cancer, | Human Prostate | Prostate | | | Uni-ZAP |
| | Stage B2; re-excision | Cancer, stage B2 | | | | XR |
| H0674 | Human Prostate Cancer, | Human Prostate | Prostate | | | Uni-ZAP |
| | Stage C; re-excission | Cancer, stage C | | | | XR |
| H0675 | Colon, Cancer | Colon Cancer | | | | pCMV Sport |
| | (9808C064R) | 9808C064R | | | | 3.0 |
| H0682 | Serous Papillary | serous papillary | | | | pCMV Sport |
| | Adenocarcinoma | adenocarcinoma | | | | 3.0 |
| | | (9606G304SPA3B) | | | | |
| H0683 | Ovarian Serous Papillary | Serous papillary | | | | pCMV Sport |
| | Adenocarcinoma | adenocarcinoma, | | | | 3.0 |
| | | stage 3C (9804G01) | | | | |
| H0684 | Serous Papillary | Ovarian Cancer- | Ovaries | | | pCMV Sport |
| | Adenocarcinoma | 9810G606 | | | | 3.0 |
| H0685 | Adenocarcinoma of | Adenocarcinoma of | | | | pCMV Sport |
| | Ovary, Human Cell Line, | Ovary, Human Cell | | | | 3.0 |
| | # OVCAR-3 | Line, # OVCAR- | | | | |
| H0686 | Adenocarcinoma of | Adenocarcinoma of | | | | pCMV Sport |
| | Ovary, Human Cell Line | Ovary, Human Cell | | | | 3.0 |
| | | Line, # SW-626 | | | | |
| H0687 | Human normal | Human normal | Ovary | | | pCMV Sport |
| | ovary(#9610G215) | ovary(#9610G215) | | | | 3.0 |
| H0688 | Human Ovarian | Human Ovarian | | | | pCMV Sport |
| | Cancer(#9807G017) | cancer(#9807G017), | | | | 3.0 |
| | | mRNA from Maura | | | | |
| | | Ru | | | | |
| H0689 | Ovarian Cancer | Ovarian Cancer, | | | | pCMV Sport |
| | | #9806G019 | | | | 3.0 |
| H0690 | Ovarian Cancer, # | Ovarian Cancer, | | | | pCMV Sport |
| | 9702G001 | #9702G001 | | | | 3.0 |
| H0691 | Normal Ovary, | normal ovary, | | | | pCMV Sport |
| | #9710G208 | #9710G208 | | | | 3.0 |
| H0693 | Normal Prostate | Normal Prostate | | | | pCMV Sport |
| | #ODQ3958EN | Tissue # | | | | 3.0 |
| | | ODQ3958EN | | | | |
| H0694 | Prostate gland | Prostate gland, | prostate | | | pCMV Sport |
| | adenocarcinoma | adenocarcinoma, | gland | | | 3.0 |
| | | mod/diff,gleason | | | | |
| N0006 | Human Fetal Brain | Human Fetal Brain | | | | |
| S0001 | Brain frontal cortex | Brain frontal cortex | Brain | | | Lambda |
| | | | | | | ZAP II |
| S0002 | Monocyte activated | Monocyte-activated | blood | Cell Line | | Uni-ZAP |
| | | | | | | XR |
| S0003 | Human Osteoclastoma | Osteoclastoma | bone | | disease | Uni-ZAP |
| | | | | | | XR |
| S0007 | Early Stage Human Brain | Human Fetal Brain | | | | Uni-ZAP |
| | | | | | | XR |
| S0010 | Human Amygdala | Amygdala | | | | Uni-ZAP |
| | | | | | | XR |
| S0011 | STROMAL - | Osteoclastoma | bone | | disease | Uni-ZAP |
| | OSTEOCLASTOMA | | | | | XR |
| S0013 | Prostate | Prostate | prostate | | | Uni-ZAP |
| | | | | | | XR |
| S0014 | Kidney Cortex | Kidney cortex | Kidney | | | Uni-ZAP |
| | | | | | | XR |
| S0015 | Kidney medulla | Kidney medulla | Kidney | | | Uni-ZAP |
| | | | | | | XR |
| S0022 | Human Osteoclastoma | Osteoclastoma | | | | Uni-ZAP |
| | Stromal Cells - | Stromal Cells | | | | XR |
| | unamplified | | | | | |
| S0026 | Stromal cell TF274 | stromal cell | Bone marrow | Cell Line | | Uni-ZAP |
| | | | | | | XR |
| S0027 | Smooth muscle, serum | Smooth muscle | Pulmanary | Cell Line | | Uni-ZAP |
| | treated | | artery | | | XR |
| S0028 | Smooth muscle, control | Smooth muscle | Pulmanary | Cell Line | | Uni-ZAP |
| | | | artery | | | XR |
| S0031 | Spinal cord | Spinal cord | spinal cord | | | Uni-ZAP |
| | | | | | | XR |
| S0032 | Smooth muscle-ILb | Smooth muscle | Pulmanary | Cell Line | | Uni-ZAP |
| | induced | | artery | | | XR |
| S0036 | Human Substantia Nigra | Human Substantia | | | | Uni-ZAP |
| | | Nigra | | | | XR |
| S0037 | Smooth muscle, IL1b | Smooth muscle | Pulmanary | Cell Line | | Uni-ZAP |
| | induced | | artery | | | XR |
| S0038 | Human Whole Brain #2 - | Human Whole Brain | | | | ZAP Express |
| | Oligo dT > 1.5 Kb | #2 | | | | |
| S0040 | Adipocytes | Human Adipocytes | | | | Uni-ZAP |
| | | from Osteoclastoma | | | | XR |
| S0044 | Prostate BPH | prostate BPH | Prostate | | disease | Uni-ZAP |
| | | | | | | XR |
| S0045 | Endothelial cells-control | Endothelial cell | endothelial | Cell Line | | Uni-ZAP |
| | | | cell-lung | | | XR |
| S0046 | Endothelial-induced | Endothelial cell | endothelial | Cell Line | | Uni-ZAP |
| | | | cell-lung | | | XR |
| S0048 | Human Hypothalamus, | Human | | | disease | Uni-ZAP |
| | Alzheimer's | Hypothalamus, | | | | XR |
| | | Alzheimer's | | | | |
| S0049 | Human Brain, Striatum | Human Brain, | | | | Uni-ZAP |
| | | Striatum | | | | XR |
| S0050 | Human Frontal Cortex, | Human Frontal | | | disease | Uni-ZAP |
| | Schizophrenia | Cortex, | | | | XR |
| | | Schizophrenia | | | | |
| S0051 | Human | Human | | | disease | Uni-ZAP |
| | Hypothalmus, Schizophre- | Hypothalamus, | | | | XR |
| | nia | Schizophrenia | | | | |
| S0052 | neigrophils control | human neutrophils | blood | Cell Line | | Uni-ZAP |
| | | | | | | XR |
| S0053 | Neutrophils IL-1 and LPS | human neutrophil | blood | Cell Line | | Uni-ZAP |
| | induced | induced | | | | XR |
| S0106 | STRIATUM | | BRAIN | | disease | Uni-ZAP |
| | DEPRESSION | | | | | XR |
| S0112 | Hypothalamus | | Brain | | | Uni-ZAP |
| | | | | | | XR |
| S0114 | Anergic T-cell | Anergic T-cell | | Cell Line | | Uni-ZAP |
| | | | | | | XR |
| S0116 | Bone marrow | Bone marrow | Bone marrow | | | Uni-ZAP |
| | | | | | | XR |
| S0126 | Osteoblasts | Osteoblasts | Knee | Cell Line | | Uni-ZAP |
| | | | | | | XR |
| S0132 | Epithelial-TNFa and INF | Airway Epithelial | | | | Uni-ZAP |
| | induced | | | | | XR |
| S0134 | Apoptotic T-cell | apoptotic cells | | Cell Line | | Uni-ZAP |
| | | | | | | XR |
| S0136 | PERM TF274 | stromal cell | Bone marrow | Cell Line | | Lambda |
| | | | | | | ZAP II |
| S0140 | eosinophil-IL5 induced | eosinophil | lung | Cell Line | | Uni-ZAP |
| | | | | | | XR |
| S0142 | Macrophage-oxLDL | macrophage- | blood | Cell Line | | Uni-ZAP |
| | | oxidized LDL | | | | XR |
| | | treated | | | | |
| S0144 | Macrophage (GM-CSF | Macrophage (GM- | | | | Uni-ZAP |
| | treated) | CSF treated) | | | | XR |
| S0146 | prostate-edited | prostate BPH | Prostate | | | Uni-ZAP |
| | | | | | | XR |
| S0150 | LNCAP prostate cell line | LNCAP Cell Line | Prostate | Cell Line | | Uni-ZAP |
| | | | | | | XR |
| S0152 | PC3 Prostate cell line | PC3 prostate cell | | | | Uni-ZAP |
| | | line | | | | XR |
| S0174 | Prostate-BPH subtracted II | Human Prostate | | | | pBluescript |
| | | BPH | | | | |
| S0176 | Prostate, normal, | Prostate | prostate | | | Uni-ZAP |
| | subtraction I | | | | | |
| S0190 | Prostate BPH, Lib 2, | Human Prostate | | | | pSport1 |
| | subtracted | BPH | | | | |
| S0192 | Synovial Fibroblasts | Synovial Fibroblasts | | | | pSport1 |
| | (control) | | | | | |
| S0194 | Synovial hypoxia | Synovial Fibroblasts | | | | pSport1 |
| S0196 | Synovial IL-1/TNF | Synovial Fibroblasts | | | | pSport1 |
| | stimulated | | | | | |
| S0206 | Smooth Muscle-HASTE | Smooth muscle | Pulmanary | Cell Line | | pBluescript |
| | normalized | | artery | | | |
| S0210 | Messangial cell, frac 2 | Messangial cell | | | | pSport1 |
| S0212 | Bone Marrow Stromal | Bone Marrow | | | | pSport1 |
| | Cell, untreated | Stromal | | | | |
| | | Cell, untreated | | | | |
| S0214 | Human Osteoclastoma, re- | Osteoclastoma | bone | | disease | Uni-ZAP |
| | excision | | | | | XR |
| S0216 | Neutrophils IL-1 and LPS | human neutrophil | blood | Cell Line | | Uni-ZAP |
| | induced | induced | | | | XR |
| S0218 | Apoptotic T-cell, re- | apoptotic cells | | Cell Line | | Uni-ZAP |
| | excision | | | | | XR |
| S0222 | H. Frontal | H. Brain, Frontal | Brain | | disease | Uni-ZAP |
| | cortex, epileptic; re- | Cortex, Epileptic | | | | XR |
| | excision | | | | | |
| S0242 | Synovial Fibroblasts | Synovial Fibroblasts | | | | pSport1 |
| | (II 1/TNF), subt | | | | | |
| S0250 | Human Osteoblasts II | Human Osteoblasts | Femur | | disease | pCMV Sport |
| | | | | | | 2.0 |
| S0260 | Spinal Cord, re-excision | Spinal cord | spinal cord | | | Uni-ZAP |
| | | | | | | XR |
| S0276 | Synovial hypoxia-RSF | Synovial fobroblasts | Synovial | | | pSport1 |
| | subtracted | (rheumatoid) | tissue | | | |
| S0278 | H Macrophage (GM-CSF | Macrophage (GM- | | | | Uni-ZAP |
| | treated), re-excision | CSF treated) | | | | XR |
| S0280 | Human Adipose Tissue, | Human Adipose | | | | Uni-ZAP |
| | re-excision | Tissue | | | | XR |
| S0282 | Brain Frontal Cortex, re- | Brain frontal cortex | Brain | | | Lambda |
| | excision | | | | | ZAPII |
| S0298 | Bone marrow | Bone marrow | Bone marrow | | | pSport1 |
| | stroma, treated | stroma, treatedSB | | | | |
| S0300 | Frontal lobe, dementia; re- | Frontal Lobe | Brain | | | Uni-ZAP |
| | excision | dementia/Alzheimer's | | | | XR |
| S0306 | Larynx normal #10 261- | Larynx normal | | | | pSport1 |
| | 273 | | | | | |
| S0316 | Human Normal | Human Normal | | | | pSport1 |
| | Cartilage, Fraction I | Cartilage | | | | |
| S0318 | Human Normal Cartilage | Human Normal | | | | pSport1 |
| | Fraction II | Cartilage | | | | |
| S0328 | Palate carcinoma | Palate carcinoma | Uvula | | disease | pSport1 |
| S0330 | Palate normal | Palate normal | Uvula | | | pSport1 |
| S0332 | Pharynx carcinoma | Pharynx carcinoma | Hypopharynx | | | pSport1 |
| S0342 | Adipocytes; re-excision | Human Adipocytes | | | | Uni-ZAP |
| | | from Osteoclastoma | | | | XR |
| S0344 | Macrophage-oxLDL; re- | macrophage- | blood | Cell Line | | Uni-ZAP |
| | excision | oxidized LDL | | | | XR |
| | | treated | | | | |
| S0346 | Human Amygdala; re- | Amygdala | | | | Uni-ZAP |
| | excision | | | | | XR |
| S0352 | Larynx Carcinoma | Larynx carcinoma | | | disease | pSport1 |
| S0354 | Colon Normal II | Colon Normal | Colon | | | pSport1 |
| S0356 | Colon Carcinoma | Colon Carcinoma | Colon | | disease | pSport1 |
| S0358 | Colon Normal III | Colon Normal | Colon | | | pSport1 |
| S0360 | Colon Tumor II | Colon Tumor | Colon | | disease | pSport1 |
| S0362 | Human Gastrocnemius | Gastrocnemius | | | | pSport1 |
| | | muscle | | | | |
| S0364 | Human Quadriceps | Quadriceps muscle | | | | pSport1 |
| S0366 | Human Soleus | Soleus Muscle | | | | pSport1 |
| S0368 | Human Pancreatic | Islets of Langerhans | | | | pSport1 |
| | Langerhans | | | | | |
| S0372 | Larynx carcinoma III | Larynx carcinoma | | | disease | pSport1 |
| S0374 | Normal colon | Normal colon | | | | pSport1 |
| S0376 | Colon Tumor | Colon Tumor | | | disease | pSport1 |
| S0378 | Pancreas normal PCA4 | Pancreas Normal | | | | pSport1 |
| | No | PCA4 No | | | | |
| S0380 | Pancreas Tumor PCA4 Tu | Pancreas Tumor | | | disease | pSport1 |
| | | PCA4 Tu | | | | |
| S0384 | Tongue carcinoma | Tongue carcinoma | | | disease | pSport1 |
| S0386 | Human Whole Brain, re- | Whole brain | Brain | | | ZAP Express |
| | excision | | | | | |
| S0388 | Human | Human | | | disease | Uni-ZAP |
| | Hypothalamus, schizophre- | Hypothalamus, | | | | XR |
| | nia, re-excision | Schizophrenia | | | | |
| S0390 | Smooth muscle, control; | Smooth muscle | Pulmanary | Cell Line | | Uni-ZAP |
| | re-excision | | artery | | | XR |
| S0400 | Brain; normal | Brain; normal | | | | pSport1 |
| S0404 | Rectum normal | Rectum, normal | | | | pSport1 |
| S0406 | Rectum tumour | Rectum tumour | | | | pSport1 |
| S0410 | Colon, tumour | Colon, tumour | | | | pSport1 |
| S0412 | Temporal cortex- | Temporal cortex, | | | disease | Other |
| | Alzheizmer; subtracted | alzheimer | | | | |
| S0414 | Hippocampus, Alzheimer | Hippocampus, | | | | Other |
| | Subtracted | Alzheimer | | | | |
| | | Subtracted | | | | |
| S0418 | CHME Cell Line; treated 5 | CHME Cell Line; | | | | pCMV Sport |
| | hrs | treated | | | | 3.0 |
| S0420 | CHME Cell | CHME Cell line, | | | | pSport1 |
| | Line, untreated | untreatetd | | | | |
| S0422 | Mo7e Cell Line GM-CSF | Mo7e Cell Line | | | | pCMV Sport |
| | treated (1 ng/ml) | GM-CSF treated | | | | 3.0 |
| | | (1 ng/ml) | | | | |
| S0424 | TF-1 Cell Line GM-CSF | TF-1 Cell Line | | | | pSport1 |
| | Treated | GM-CSF Treated | | | | |
| S0428 | Neutrophils control; re- | human neutrophils | blood | Cell Line | | Uni-ZAP |
| | excision | | | | | XR |
| S0430 | Aryepiglottis Normal | Aryepiglottis | | | | pSport1 |
| | | Normal | | | | |
| S0434 | Stomach Normal | Stomach Normal | | | disease | pSport1 |
| S0440 | Liver Tumour Met 5 Tu | Liver Tumour | | | | pSport1 |
| S0442 | Colon Normal | Colon Normal | | | | pSport1 |
| S0444 | Colon Tumor | Colon Tumour | | | disease | pSport1 |
| S0446 | Tongue Tumour | Tongue Tumour | | | | pSport1 |
| S0450 | Larynx Tumour | Larynx Tumour | | | | pSport1 |
| S0464 | Larynx Normal | Larynx Normal | | | | pSport1 |
| S0466 | Larynx Tumor | Larynx Tumor | | | disease | pSport1 |
| S0468 | Ea.hy.926 cell line | Ea.hy.926 cell line | | | | pSport1 |
| S0474 | Human blood platelets | Platelets | Blood | | | Other |
| | | | platelets | | | |
| S3012 | Smooth Muscle Serum | Smooth muscle | Pulmanary | Cell Line | | pBluescript |
| | Treated, Norm | | artery | | | |
| S3014 | Smooth muscle, serum | Smooth muscle | Pulmanary | Cell Line | | pBluescript |
| | induced, re-exc | | artery | | | |
| S6014 | H. hypothalamus, frac A | Hypothalamus | Brain | | | ZAP Express |
| S6022 | H. Adipose Tissue | Human Adipose | | | | Uni-ZAP |
| | | Tissue | | | | XR |
| S6024 | Alzheimers, spongy | Alzheimer's/Spongy | Brain | | disease | Uni-ZAP |
| | change | change | | | | XR |
| S6026 | Frontal Lobe, Dementia | Frontal Lobe | Brain | | | Uni-ZAP |
| | | dementia/Alzheimer's | | | | XR |
| S6028 | Human Manic Depression | Human Manic | Brain | | disease | Uni-ZAP |
| | Tissue | depression tissue | | | | XR |
| T0002 | Activated T-cells | Activated T-Cell, | Blood | Cell Line | | pBluescript |
| | | PBL fraction | | | | SK- |
| T0003 | Human Fetal Lung | Human Fetal Lung | | | | pBluescript |
| | | | | | | SK- |
| T0006 | Human Pineal Gland | Human Pinneal | | | | pBluescript |
| | | Gland | | | | SK- |
| T0008 | Colorectal Tumor | Colorectal Tumor | | | disease | pBluescript |
| | | | | | | SK- |
| T0010 | Human Infant Brain | Human Infant Brain | | | | Other |
| T0023 | Human Pancreatic | Human Pancreatic | | | disease | pBluescript |
| | Carcinoma | Carcinoma | | | | SK- |
| T0039 | HSA 172 Cells | Human HSA172 cell | | | | pBluescript |
| | | line | | | | SK- |
| T0040 | HSC172 cells | SA172 Cells | | | | pBluescript |
| | | | | | | SK- |
| T0041 | Jurkat T-cell G1 phase | Jurkat T-cell | | | | pBluescript |
| | | | | | | SK- |
| T0042 | Jurkat T-Cell, S phase | Jurkat T-Cell Line | | | | pBluescript |
| | | | | | | SK- |
| T0048 | Human Aortic | Human Aortic | | | | pBluescript |
| | Endothelium | Endothilium | | | | SK- |
| T0049 | Aorta endothelial cells + | Aorta endothelial | | | | pBluescript |
| | TNF-a | cells | | | | SK- |
| T0067 | Human Thyroid | Human Thyroid | | | | pBluescript |
| | | | | | | SK- |
| T0082 | Human Adult Retina | Human Adult Retina | | | | pBluescript |
| | | | | | | SK- |
| T0103 | Human colon carcinoma | | | | | pBluescript |
| | (HCC) cell line | | | | | SK- |
| T0109 | Human (HCC) cell line | | | | | pBluescript |
| | liver (mouse) metastasis, | | | | | SK- |
| | remake | | | | | |
| T0110 | Human colon carcinoma | | | | | pBluescript |
| | (HCC) cell line, remake | | | | | SK- |
| T0112 | Human (Caco-2) cell line, | | | | | pBluescript |
| | adenocarcinoma, colon | | | | | SK- |
| T0114 | Human (Caco-2) cell line, | | | | | pBluescript |
| | adenocarcinoma, colon, | | | | | SK- |
| | remake | | | | | |
| T0115 | Human Colon Carcinoma | | | | | pBluescript |
| | (HCC) cell line | | | | | SK- |
| L0002 | Atrium cDNA library | | | | | |
| | Human heart | | | | | |
| L0005 | Clontech human aorta | | | | | |
| | polyA + mRNA (#6572) | | | | | |
| L0021 | Human adult (K. Okubo) | | | | | |
| L0022 | Human adult lung 3″ | | | | | |
| | directed MboI cDNA | | | | | |
| L0040 | Human colon mucosa | | | | | |
| L0055 | Human promyelocyte | | | | | |
| L0096 | Subtracted human retina | | | | | |
| L0097 | Subtracted human retinal | | | | | |
| | pigment epithelium (RPE) | | | | | |
| L0109 | Human brain cDNA | brain | | | | |
| L0142 | Human placenta cDNA | placenta | | | | |
| | (TFujiwara) | | | | | |
| L0157 | Human fetal brain | | brain | | | |
| | (TFujiwara) | | | | | |
| L0163 | Human heart cDNA | | heart | | | |
| | (YNakamura) | | | | | |
| L0351 | Infant brain, Bento Soares | | | | | BA, M13- |
| | | | | | | derived |
| L0352 | Normalized infant brain, | | | | | BA, M13- |
| | Bento Soares | | | | | derived |
| L0359 | X, Human Liver tissue | | | | | Bluescript |
| | | | | | | KS II+ |
| L0361 | Stratagene ovary | | ovary | | | Bluescript |
| | (#937217) | | | | | SK |
| L0362 | Stratagene ovarian cancer | | | | | Bluescript |
| | (#937219) | | | | | SK- |
| L0363 | NCI_CGAP_GC2 | germ cell tumor | | | | Bluescript |
| | | | | | | SK- |
| L0364 | NCI_CGAP_GC5 | germ cell tumor | | | | Bluescript |
| | | | | | | SK- |
| L0366 | Stratagene schizo brain | schizophrenic brain | | | | Bluescript |
| | S11 | S-11 frontal lobe | | | | SK- |
| L0369 | NCI_CGAP_AA1 | adrenal adenoma | adrenal gland | | | Bluescript |
| | | | | | | SK- |
| L0370 | Johnston frontal cortex | pooled frontal lobe | brain | | | Bluescript |
| | | | | | | SK- |
| L0371 | NCI_CGAP_Br3 | breast tumor | breast | | | Bluescript |
| | | | | | | SK- |
| L0372 | NCI_CGAP_Co12 | colon tumor | colon | | | Bluescript |
| | | | | | | SK- |
| L0373 | NCI_CGAP_Co11 | tumor | colon | | | Bluescript |
| | | | | | | SK- |
| L0375 | NCI_CGAP_Kid6 | kidney tumor | kidney | | | Bluescript |
| | | | | | | SK- |
| L0376 | NCI_CGAP_Lar1 | larynx | larynx | | | Bluescript |
| | | | | | | SK- |
| L0378 | NCI_CGAP_Lu1 | lung tumor | lung | | | Bluescript |
| | | | | | | SK- |
| L0381 | NCI_CGAP_HN4 | squamous cell | pharynx | | | Bluescript |
| | | carcinoma | | | | SK- |
| L0382 | NCI_CGAP_Pr25 | epithelium (cell line) | prostate | | | Bluescript |
| | | | | | | SK- |
| L0383 | NCI_CGAP_Pr24 | invasive tumor (cell | prostate | | | Bluescript |
| | | line) | | | | SK- |
| L0384 | NCI_CGAP_Pr23 | prostate tumor | prostate | | | Bluescript |
| | | | | | | SK- |
| L0386 | NCI_CGAP_HN3 | squamous cell | tongue | | | Bluescript |
| | | carcinoma from base | | | | SK- |
| | | of tongue | | | | |
| L0387 | NCI_CGAP_GCB0 | germinal center B- | tonsil | | | Bluescript |
| | | cells | | | | SK- |
| L0388 | NCI_CGAP_HN6 | normal gingiva (cell | | | | Bluescript |
| | | line from | | | | SK- |
| | | immortalized kerati | | | | |
| L0389 | NCI_CGAP_HN5 | normal gingiva (cell | | | | Bluescript |
| | | line from primary | | | | SK- |
| | | keratinocyt | | | | |
| L0394 | H, Human adult Brain | | | | | gt11 |
| | Cortex tissue | | | | | |
| L0418 | b4HB3MA − Cot109 + 10- | | | | | Lafmid BA |
| | Bio | | | | | |
| L0435 | Infant brain, LLNL array | | | | | lafmid BA |
| | of Dr. M. Soares 1NIB | | | | | |
| L0438 | normalized infant brain | total brain | brain | | | lafmid BA |
| | cDNA | | | | | |
| L0439 | Soares infant brain 1NIB | | whole brain | | | Lafmid BA |
| L0451 | N3HFLSK20 | | | | | Lafmid K |
| L0455 | Human retina cDNA | retina | eye | | | lambda gt10 |
| | randomly primed | | | | | |
| | sublibrary | | | | | |
| L0456 | Human retina cDNA | retina | eye | | | lambda gt10 |
| | Tsp5091-cleaved | | | | | |
| | sublibrary | | | | | |
| L0471 | Human fetal heart, | | | | | Lambda |
| | Lambda ZAP Express | | | | | ZAP Express |
| L0475 | KG1-a Lambda Zap | | | KG1-a | | Lambda Zap |
| | Express cDNA library | | | | | Express |
| | | | | | | (Stratagene) |
| L0480 | Stratagene cat #937212 | | | | | Lambda |
| | (1992) | | | | | ZAP, |
| | | | | | | pBluescript |
| | | | | | | SK(-) |
| L0483 | Human pancreatic islet | | | | | Lambda |
| | | | | | | ZAPII |
| L0485 | STRATAGENE Human | skeletal muscle | leg muscle | | | Lambda |
| | skeletal muscle cDNA | | | | | ZAPII |
| | library, cat. #936215. | | | | | |
| L0498 | NCI_CGAP_HSC3 | CD34+, T negative, | bone marrow | | | pAMP1 |
| | | patient with chronic | | | | |
| | | myelogenou | | | | |
| L0502 | NCI_CGAP_Br15 | adenocarcinoma | breast | | | pAMP1 |
| L0509 | NCI_CGAP_Lu26 | invasive | lung | | | pAMP1 |
| | | adenocarcinoma | | | | |
| L0512 | NCI_CGAP_Ov36 | borderline ovarian | ovary | | | pAMP1 |
| | | carcinoma | | | | |
| L0517 | NCI_CGAP_Pr1 | | | | | pAMP10 |
| L0518 | NCI_CGAP_Pr2 | | | | | pAMP10 |
| L0519 | NCI_CGAP_Pr3 | | | | | pAMP10 |
| L0520 | NCI_CGAP_Alv1 | alveolar | | | | pAMP10 |
| | | rhabdomyosarcoma | | | | |
| L0521 | NCI_CGAP_Ew1 | Ewing's sarcoma | | | | pAMP10 |
| L0523 | NCI_CGAP_Lip2 | liposarcoma | | | | pAMP10 |
| L0526 | NCI_CGAP_Pr12 | metastatic prostate | | | | pAMP10 |
| | | bone lesion | | | | |
| L0527 | NCI_CGAP_Ov2 | ovary | | | | pAMP10 |
| L0529 | NCI_CGAP_Pr6 | prostate | | | | pAMP10 |
| L0530 | NCI_CGAP_Pr8 | prostate | | | | pAMP10 |
| L0539 | Chromosome 7 Placental | | placenta | | | pAMP10 |
| | cDNA Library | | | | | |
| L0540 | NCI_CGAP_Pr10 | invasive prostate | prostate | | | pAMP10 |
| | | tumor | | | | |
| L0543 | NCI_CGAP_Pr9 | normal prostatic | prostate | | | pAMP10 |
| | | epithelial cells | | | | |
| L0558 | NCI_CGAP_Ov40 | endometrioid | ovary | | | pAMP10 |
| | | ovarian metastasis | | | | |
| L0559 | NCI_CGAP_Ov39 | papillary serous | ovary | | | pAMP10 |
| | | ovarian metastasis | | | | |
| L0564 | Jia bone marrow stroma | bone marrow stroma | | | | pBluescript |
| L0565 | Normal Human | Bone | Hip | | | pBluescript |
| | Trabecular Bone Cells | | | | | |
| L0581 | Stratagene liver (#937224) | | liver | | | pBluescript |
| | | | | | | SK |
| L0587 | Stratagene colon HT29 | | | | | pBluescript |
| | (#937221) | | | | | SK- |
| L0588 | Stratagene endothelial cell | | | | | pBluescript |
| | 937223 | | | | | SK- |
| L0589 | Stratagene fetal retina | | | | | pBluescript |
| | 937202 | | | | | SK- |
| L0590 | Stratagene fibroblast | | | | | pBluescript |
| | (#937212) | | | | | SK- |
| L0591 | Stratagene HeLa cell s3 | | | | | pBluescript |
| | 937216 | | | | | SK- |
| L0592 | Stratagene hNT neuron | | | | | pBluescript |
| | (#937233) | | | | | SK- |
| L0593 | Stratagene | | | | | pBluescript |
| | neuroepithelium | | | | | SK- |
| | (#937231) | | | | | |
| L0594 | Stratagene | | | | | pBluescript |
| | neuroepithelium | | | | | SK- |
| | NT2RAMI 937234 | | | | | |
| L0595 | Stratagene NT2 neuronal | neuroepithelial cells | brain | | | pBluescript |
| | precursor 937230 | | | | | SK- |
| L0596 | Stratagene colon | | colon | | | pBluescript |
| | (#937204) | | | | | SK- |
| L0598 | Morton Fetal Cochlea | cochlea | ear | | | pBluescript |
| | | | | | | SK- |
| L0599 | Stratagene lung (#937210) | | lung | | | pBluescript |
| | | | | | | SK- |
| L0600 | Weizmann Olfactory | olfactory epithelium | nose | | | pBluescript |
| | Epithelium | | | | | SK- |
| L0601 | Stratagene pancreas | | pancreas | | | pBluescript |
| | (#937208) | | | | | SK- |
| L0602 | Pancreatic Islet | pancreatic islet | pancreas | | | pBluescript |
| | | | | | | SK- |
| L0604 | Stratagene muscle 937209 | muscle | skeletal | | | pBluescript |
| | | | muscle | | | SK- |
| L0605 | Stratagene fetal spleen | fetal spleen | spleen | | | pBluescript |
| | (#937205) | | | | | SK- |
| L0607 | NCI_CGAP_Lym6 | mantle cell | lymph node | | | pBluescript |
| | | lymphoma | | | | SK- |
| L0608 | Stratagene lung carcinoma | lung carcinoma | lung | NCI-H69 | | pBluescript |
| | 937218 | | | | | SK- |
| L0609 | Schiller astrocytoma | astrocytoma | brain | | | pBluescript |
| | | | | | | SK- |
| | | | | | | (Stratagene) |
| L0612 | Schiller | oligodendroglioma | brain | | | pBluescript |
| | oligodendroglioma | | | | | SK- |
| | | | | | | (Stratagene) |
| L0617 | Chromosome 22 exon | | | | | pBluescriptII |
| | | | | | | KS+ |
| L0622 | HM1 | | | | | pcDNAII |
| | | | | | | (Invitrogen) |
| L0623 | HM3 | pectoral muscle | | | | pcDNAII |
| | | (after mastectomy) | | | | (Invitrogen) |
| L0625 | NCI_CGAP_AR1 | bulk alveolar tumor | | | | pCMV- |
| | | | | | | SPORT2 |
| L0626 | NCI_CGAP_GC1 | bulk germ cell | | | | pCMV- |
| | | serminoma | | | | SPORT2 |
| L0631 | NCI_CGAP_Br7 | | breast | | | pCMV- |
| | | | | | | SPORT4 |
| L0635 | NCI_CGAP_PNS1 | dorsal root ganglion | peripheral | | | pCMV- |
| | | | nervous | | | SPORT4 |
| | | | system | | | |
| L0637 | NCI_CGAP_Brn53 | three pooled | brain | | | pCMV- |
| | | meningiomas | | | | SPORT6 |
| L0638 | NCI_CGAP_Brn35 | tumor, 5 pooled (see | brain | | | pCMV- |
| | | description) | | | | SPORT6 |
| L0639 | NCI_CGAP_Brn52 | tumor, 5 pooled (see | brain | | | pCMV- |
| | | description) | | | | SPORT6 |
| L0640 | NCI_CGAP_Brn18 | four pooled high- | breast | | | pCMV- |
| | | grade tumors, | | | | SPORT6 |
| | | including two prima | | | | |
| L0641 | NCI_CGAP_Co17 | juvenile granulosa | colon | | | pCMV- |
| | | tumor | | | | SPORT6 |
| L0642 | NCI_CGAP_Co18 | moderately | colon | | | pCMV- |
| | | differentiated | | | | SPORT6 |
| | | adenocarcinoma | | | | |
| L0643 | NCI_CGAP_Co19 | moderately | colon | | | pCMV- |
| | | differentiated | | | | SPORT6 |
| | | adenocarcinoma | | | | |
| L0645 | NCI_CGAP_Co21 | moderately | colon | | | pCMV- |
| | | differentiated | | | | SPORT6 |
| | | adenocarcinoma | | | | |
| L0646 | NCI_CGAP_Co14 | moderately- | colon | | | pCMV- |
| | | differentiated | | | | SPORT6 |
| | | adenocarcinoma | | | | |
| L0647 | NCI_CGAP_Sar4 | five pooled | connective | | | pCMV- |
| | | sarcomas, including | tissue | | | SPORT6 |
| | | myxoid liposarcoma | | | | |
| L0648 | NCI_CGAP_Eso2 | squamous cell | esophagus | | | pCMV- |
| | | carcinoma | | | | SPORT6 |
| L0649 | NCI_CGAP_GU1 | 2 pooled high-grade | genitourinary | | | pCMV- |
| | | transitional cell | tract | | | SPORT6 |
| | | tumors | | | | |
| L0650 | NCI_CGAP_Kid13 | 2 pooled Wilms' | kidney | | | pCMV- |
| | | tumors, one primary | | | | SPORT6 |
| | | and one metast | | | | |
| L0651 | NCI_CGAP_Kid8 | renal cell tumor | kidney | | | pCMV- |
| | | | | | | SPORT6 |
| L0653 | NCI_CGAP_Lu28 | two pooled | lung | | | pCMV- |
| | | squamous cell | | | | SPORT6 |
| | | carcinomas | | | | |
| L0654 | NCI_CGAP_Lu31 | | lung, cell line | | | pCMV- |
| | | | | | | SPORT6 |
| L0655 | NCL_CGAP_Lym12 | lymphoma, | lymph node | | | pCMV- |
| | | follicular mixed | | | | SPORT6 |
| | | small and large cell | | | | |
| L0656 | NCI_CGAP_Ov38 | normal epithelium | ovary | | | pCMV- |
| | | | | | | SPORT6 |
| L0657 | NCI_CGAP_Ov23 | tumor, 5 pooled (see | ovary | | | pCMV- |
| | | description) | | | | SPORT6 |
| L0659 | NCI_CGAP_Pan1 | adenocarcinoma | pancreas | | | pCMV- |
| | | | | | | SPORT6 |
| L0661 | NCI_CGAP_Mel15 | malignant | skin | | | pCMV- |
| | | melanoma, | | | | SPORT6 |
| | | metastatic to lymph | | | | |
| | | node | | | | |
| L0662 | NCI_CGAP_Gas4 | poorly differentiated | stomach | | | pCMV- |
| | | adenocarcinoma | | | | SPORT6 |
| | | with signet r | | | | |
| L0663 | NCI_CGAP_Ut2 | moderately- | uterus | | | pCMV- - |
| | | differentiated | | | | SPORT6 |
| | | endometrial | | | | |
| | | adenocarcino | | | | |
| L0664 | NCI_CGAP_Ut3 | poorly-differentiated | uterus | | | pCMV- |
| | | endometrial | | | | SPORT6 |
| | | adenocarcinoma, | | | | |
| L0665 | NCI_CGAP_Ut4 | serous papillary | uterus | | | pCMV- |
| | | carcinoma, high | | | | SPORT6 |
| | | grade, 2 pooled t | | | | |
| L0666 | NCI_CGAP_Ut1 | well-differentiated | uterus | | | pCMV- |
| | | endometrial | | | | SPORT6 |
| | | adenocarcinoma, 7 | | | | |
| L0667 | NCI_CGAP_CML1 | myeloid cells, 18 | whole blood | | | pCMN- |
| | | pooled CML cases, | | | | SPORT6 |
| | | BCR/ABL rearra | | | | |
| L0686 | Stanley Frontal SN pool 2 | frontal lobe (see | brain | | | pCR2.1- |
| | | description) | | | | TOPO |
| | | | | | | (Invitrogen) |
| L0698 | Testis 2 | | | | | PGEM |
| | | | | | | 5zf(+) |
| L0717 | Gessler Wilms tumor | | | | | pSPORT1 |
| L0731 | Soares_pregnant_uterus_ | | uterus | | | pT7T3-Pac |
| | NbHPU | | | | | |
| L0740 | Soares melanocyte | melanocyte | | | | pT7T3D |
| | 2NbHM | | | | | (Pharmacia) |
| | | | | | | with a |
| | | | | | | modified |
| | | | | | | polylinker |
| L0741 | Soares adult brain | | brain | | | pT7T3D |
| | N2b4HB55Y | | | | | (Pharmacia) |
| | | | | | | with a |
| | | | | | | modified |
| | | | | | | polylinker |
| L0742 | Soares adult brain | | brain | | | pT7T3D |
| | N2b5HB55Y | | | | | (Pharmacia) |
| | | | | | | with a |
| | | | | | | modified |
| | | | | | | polylinker |
| L0743 | Soares breast 2NbRBst | | breast | | | pT7T3D |
| | | | | | | (Pharmacia) |
| | | | | | | with a |
| | | | | | | modified |
| | | | | | | polylinker |
| L0744 | Soares breast 3NbHBst | | breast | | | pT7T3D |
| | | | | | | (Pharmacia) |
| | | | | | | with a |
| | | | | | | modified |
| | | | | | | polylinker |
| L0745 | Soares retina N2b4HR | retina | eye | | | pT7T3D |
| | | | | | | (Pharmacia) |
| | | | | | | with a |
| | | | | | | modified |
| | | | | | | polylinker |
| L0746 | Soares retina N2b5HR | retina | eye | | | pT7T3D |
| | | | | | | (Pharmacia) |
| | | | | | | with a |
| | | | | | | modified |
| | | | | | | polylinker |
| L0747 | Soares_fetal_heart_NbHH | | heart | | | pT7T3D |
| | 19W | | | | | (Pharmacia) |
| | | | | | | with a |
| | | | | | | modified |
| | | | | | | polylinker |
| L0748 | Soares fetal liver spleen | | Liver and | | | pT7T3D |
| | 1NFLS | | Spleen | | | (Pharmacia) |
| | | | | | | with a |
| | | | | | | modified |
| | | | | | | polylinker |
| L0749 | Soares_fetal_liver_spleen | | Liver and | | | pT7T3D |
| | _1NFLS_S1 | | Spleen | | | (Pharmacia) |
| | | | | | | with a |
| | | | | | | modified |
| | | | | | | polylinker |
| L0750 | Soares_fetal_lung_NbHL1 | | lung | | | pT7T3D |
| | 9W | | | | | (Pharmacia) |
| | | | | | | with a |
| | | | | | | modified |
| | | | | | | polylinker |
| L0751 | Soares ovary tumor | ovarian tumor | ovary | | | pT7T3D |
| | NbHOT | | | | | (Pharmacia) |
| | | | | | | with a |
| | | | | | | modified |
| | | | | | | polylinker |
| L0752 | Soares_parathyroid_tumor | parathyroid tumor | parathyroid | | | pT7F3D |
| | _NbHPA | | gland | | | (Pharmacia) |
| | | | | | | with a |
| | | | | | | modified |
| | | | | | | polylinker |
| L0753 | Soares_pineal_gland_N3H | | pineal gland | | | pT7T3D |
| | PG | | | | | (Pharmacia) |
| | | | | | | with a |
| | | | | | | modified |
| | | | | | | polylinker |
| L0754 | Soares placenta Nb2HP | | placenta | | | pT7T3D |
| | | | | | | (Pharmacia) |
| | | | | | | with a |
| | | | | | | modified |
| | | | | | | polylinker |
| L0755 | Soares_placenta_8to9 | | placenta | | | pT7T3D |
| | weeks_2NbHP8to9W | | | | | (Pharmacia) |
| | | | | | | with a |
| | | | | | | modified |
| | | | | | | polylinker |
| L0756 | Soares_multiple_sclerosis | multiple sclerosis | | | | pT7T3D |
| | _2NbHMSP | lesions | | | | (Pharmacia) |
| | | | | | | with a |
| | | | | | | modified |
| | | | | | | polylinker |
| | | | | | | V_TYPE |
| L0757 | Soares_senescent_fibro- | senescent fibroblast | | | | pT7T3D |
| | blasts_NbHSF | | | | | (Pharmacia) |
| | | | | | | with a |
| | | | | | | modified |
| | | | | | | polylinker |
| | | | | | | V_TYPE |
| L0758 | Soares_testis_NHT | | | | | pT7T3D-Pac |
| | | | | | | (Pharmacia) |
| | | | | | | with a |
| | | | | | | modified |
| | | | | | | polylinker |
| L0759 | Soares_total_fetus_Nb2H | | | | | pT7T3D-Pac |
| | F8_9w | | | | | (Pharmacia) |
| | | | | | | with a |
| | | | | | | modified |
| | | | | | | polylinker |
| L0760 | Barstead aorta HPLRB3 | aorta | | | | pT7T3D-Pac |
| | | | | | | (Pharmacia) |
| | | | | | | with a |
| | | | | | | modified |
| | | | | | | polylinker |
| L0761 | NCI_CGAP_CLL1 | B-cell, chronic | | | | pT7T3D-Pac |
| | | lymphotic leukemia | | | | (Pharmacia) |
| | | | | | | with a |
| | | | | | | modified |
| | | | | | | polylinker |
| L0762 | NCI_CGAP_Br1.1 | breast | | | | pT7T3D-Pac |
| | | | | | | (Pharmacia) |
| | | | | | | with a |
| | | | | | | modified |
| | | | | | | polylinker |
| L0763 | NCI_CGAP_Br2 | breast | | | | pT7T3D-Pac |
| | | | | | | (Pharmacia) |
| | | | | | | with a |
| | | | | | | modified |
| | | | | | | polylinker |
| L0764 | NCI_CGAP_Co3 | colon | | | | pT7T3D-Pac |
| | | | | | | (Pharmacia) |
| | | | | | | with a |
| | | | | | | modified |
| | | | | | | polylinker |
| L0765 | NCI_CGAP_Co4 | colon | | | | pT7T3D-Pac |
| | | | | | | (Pharmacia) |
| | | | | | | with a |
| | | | | | | modified |
| | | | | | | polylinker |
| L0766 | NCI_CGAP_GCB1 | germinal center B | | | | pT7T3D-Pac |
| | | cell | | | | (Pharmacia) |
| | | | | | | with a |
| | | | | | | modified |
| | | | | | | polylinker |
| L0767 | NCI_CGAP_GC3 | pooled germ cell | | | | pT7T3D-Pac |
| | | tumors | | | | (Pharmacia) |
| | | | | | | with a |
| | | | | | | modified |
| | | | | | | polylinker |
| L0768 | NCI_CGAP_GC4 | pooled germ cell | | | | pT7T3D-Pac |
| | | tumors | | | | (Pharmacia) |
| | | | | | | with a |
| | | | | | | modified |
| | | | | | | polylinker |
| L0769 | NCI_CGAP_Bm25 | anaplastic | brain | | | pT7T3D-Pac |
| | | oligodendroglioma | | | | (Pharmacia) |
| | | | | | | with a |
| | | | | | | modified |
| | | | | | | polylinker |
| L0770 | NCI_CGAP_Bm23 | glioblastoma | brain | | | pT7T3D-Pac |
| | | (pooled) | | | | (Pharmacia) |
| | | | | | | with a |
| | | | | | | modified |
| | | | | | | polylinker |
| L0771 | NCI_CGAP_Co8 | adenocarcinoma | colon | | | pT7T3D-Pac |
| | | | | | | (Pharmacia) |
| | | | | | | with a |
| | | | | | | modified |
| | | | | | | polylinker |
| L0772 | NCI_CGAP_Co10 | colon tumor RER+ | colon | | | pT7T3D-Pac |
| | | | | | | (Pharmacia) |
| | | | | | | with a |
| | | | | | | modified |
| | | | | | | polylinker |
| L0773 | NCI_CGAP_Co9 | colon tumor RER+ | colon | | | pT7T3D-Pac |
| | | | | | | (Pharmacia) |
| | | | | | | with a |
| | | | | | | modified |
| | | | | | | polylinker |
| L0774 | NCI_CGAP_Kid3 | | kidney | | | pT7T3D-Pac |
| | | | | | | (Pharmacia) |
| | | | | | | with a |
| | | | | | | modified |
| | | | | | | polylinker |
| L0775 | NCI_CGAP_Kid5 | 2 pooled tumors | kidney | | | pT7T3D-Pac |
| | | (clear cell type) | | | | (Pharmacia) |
| | | | | | | with a |
| | | | | | | modified |
| | | | | | | polylinker |
| L0776 | NCI_CGAP_Lu5 | carcinoid | lung | | | pT7T3D-Pac |
| | | | | | | (Pharmacia) |
| | | | | | | with a |
| | | | | | | modified |
| | | | | | | polylinker |
| L0777 | Soares_NhHMPu_S1 | Pooled human | mixed (see | | | pT7T3D-Pac |
| | | melanocyte, fetal | below) | | | (Pharmacia) |
| | | heart, and pregnant | | | | with a |
| | | | | | | modified |
| | | | | | | polylinker |
| L0779 | Soares_NFL_T_GBC_S1 | | pooled | | | pT7T3D-Pac |
| | | | | | | (Pharmacia) |
| | | | | | | with a |
| | | | | | | modified |
| | | | | | | polylinker |
| L0780 | Soares_NSF_F8_9W_OT | | pooled | | | pT7T3D-Pac |
| | _PA_P_S1 | | | | | (Pharmacia) |
| | | | | | | with a |
| | | | | | | modified |
| | | | | | | polylinker |
| L0782 | NCI_CGAP_Pr21 | normal prostate | prostate | | | pT7T3D-Pac |
| | | | | | | (Pharmacia) |
| | | | | | | with a |
| | | | | | | modified |
| | | | | | | polylinker |
| L0783 | NCI_CGAP_Pr22 | normal prostate | prostate | | | pT7T3D-Pac |
| | | | | | | (Pharmacia) |
| | | | | | | with a |
| | | | | | | modified |
| | | | | | | polylinker |
| L0784 | NCI_CGAP_Le12 | leiomyosarcoma | soft tissue | | | pT7T3D-Pac |
| | | | | | | (Pharmacia) |
| | | | | | | with a |
| | | | | | | modified |
| | | | | | | polylinker |
| L0785 | Barstead spleen HPLRB2 | | spleen | | | pT7T3D-Pac |
| | | | | | | (Pharmacia) |
| | | | | | | with a |
| | | | | | | modified |
| | | | | | | polylinker |
| L0787 | NCI_CGAP_Sub1 | | | | | pT7T3D-Pac |
| | | | | | | (Pharmacia) |
| | | | | | | with a |
| | | | | | | modified |
| | | | | | | polylinker |
| L0788 | NCI_CGAP_Sub2 | | | | | pT7T3D-Pac |
| | | | | | | (Pharmacia) |
| | | | | | | with a |
| | | | | | | modified |
| | | | | | | polylinker |
| L0789 | NCI_CGAP_Sub3 | | | | | pT7T3D-Pac |
| | | | | | | (Pharmacia) |
| | | | | | | with a |
| | | | | | | modified |
| | | | | | | polylinker |
| L0790 | NCI_CGAP_Sub4 | | | | | pT7T3D-Pac |
| | | | | | | (Pharmacia) |
| | | | | | | with a |
| | | | | | | modified |
| | | | | | | polylinker |
| L0791 | NCI_CGAP_Sub5 | | | | | pT7T3D-Pac |
| | | | | | | (Pharmacia) |
| | | | | | | with a |
| | | | | | | modified |
| | | | | | | polylinker |
| L0792 | NCI_CGAP_Sub6 | | | | | pT7T3D-Pac |
| | | | | | | (Pharmacia) |
| | | | | | | with a |
| | | | | | | modified |
| | | | | | | polylinker |
| L0794 | NCI_CGAP_GC6 | pooled germ cell | | | | pT7T3D-Pac |
| | | tumors | | | | (Pharmacia) |
| | | | | | | with a |
| | | | | | | modified |
| | | | | | | polylinker |
| L0796 | NCI_CGAP_Brn50 | medulloblastoma | brain | | | pT7T3D-Pac |
| | | | | | | (Pharmacia) |
| | | | | | | with a |
| | | | | | | modified |
| | | | | | | polylinker |
| L0800 | NCI_CGAP_Co16 | colon tumor, RER+ | colon | | | pT7T3D-Pac |
| | | | | | | (Pharmacia) |
| | | | | | | with a |
| | | | | | | modified |
| | | | | | | polylinker |
| L0803 | NCI_CGAP_Kid1 | | kidney | | | pT7T3D-Pac |
| | | | | | | (Pharmacia) |
| | | | | | | with a |
| | | | | | | modified |
| | | | | | | polylinker |
| L0804 | NGI_CGAP_Kid12 | 2 pooled tumors | kidney | | | pT7T3D-Pac |
| | | (clear cell type) | | | | (Pharmacia) |
| | | | | | | with a |
| | | | | | | modified |
| | | | | | | polylinker |
| L0805 | NCI_CGAP_Lu24 | carcinoid | lung | | | pT7T3D-Pac |
| | | | | | | (Pharmacia) |
| | | | | | | with a |
| | | | | | | modified |
| | | | | | | polylinker |
| L0806 | NCI_CGAP_Lu19 | squamous cell | lung | | | pT7T3D-Pac |
| | | carcinoma, poorly | | | | (Pharmacia) |
| | | differentiated (4 | | | | with a |
| | | | | | | modified |
| | | | | | | polylinker |
| L0807 | NCI_CGAP_Ov18 | fibrotheoma | ovary | | | pT7T3D-Pac |
| | | | | | | (Pharmacia) |
| | | | | | | with a |
| | | | | | | modified |
| | | | | | | polylinker |
| L0809 | NCI_CGAP_Pr28 | | prostate | | | pT7T3D-Pac |
| | | | | | | (Pharmacia) |
| | | | | | | with a |
| | | | | | | modified |
| | | | | | | polylinker |
| L2251 | Human fetal lung | Fetal lung | | | | |

[0100] TABLE 5

| OMIM | |
|---|---|
| Reference | Description |
| 106300 | Ankylosing spondylitis |
| 108800 | Atrial septal defect, secundum type |
| 120290 | OSMED syndrome, 215150 |
| 120290 | Stickler syndrome, type II, 184840 |
| 120810 | C4 deficiency |
| 120820 | C4 deficiency |
| 142857 | Pemphigoid, susceptibility to |
| 142858 | Beryllium disease, chronic, susceptibility to |
| 150270 | Laryngeal adductor paralysis |
| 157640 | PEO with mitochondrial DNA deletions, type 1 |
| 167250 | Paget disease of bone |
| 170261 | Bare lymphocyte syndrome, type I, due to TAP2 deficiency |
| 170995 | Zeliweger syndrome-2 |
| 174900 | Polyposis, juvenile intestinal |
| 177900 | Psoriasis susceptibility-1 |
| 179450 | Ragweed sensitivity |
| 180250 | Retinol binding protein, deficiency of |
| 186770 | Leukemia, T-cell acute lymphocytic |
| 188550 | Thyroid papillary carcinoma |
| 188826 | Sorsby fundus dystrophy, 136900 |
| 191540 | [Urate oxidase deficiency] |
| 201910 | Adrenal hyperplasia, congenital, due to 21-hydroxylase |
| | deficiency |
| 217000 | C2 deficiency |
| 222100 | Diabetes mellitus, insulin-dependent-1 |
| 233100 | [Renal glucosuria] |
| 235200 | Hemochromatosis |
| 236730 | Urofacial syndrome |
| 248611 | Maple syrup urine disease, type Ib |
| 250100 | Metachromatic leukodystrophy |
| 250800 | Methemoglobinemia, type I |
| 250800 | Methemoglobinemia, type II |
| 256550 | Sialidosis, type I |
| 256550 | Sialidosis, type II |
| 271245 | Spinocerebellar ataxia-8, infantile, with sensory neuropathy |
| 274270 | Thymine-uraciluria |
| 274270 | Fluorouracil toxicity, sensitivity to |
| 278000 | Wolman disease |
| 278000 | Cholesteryl ester storage disease |
| 304040 | Charcot-Marie-Tooth neuropathy, X-linked-1, dominant, |
| | 302800 |
| 305100 | Anhidrotic ectodermal dysplasia |
| 305450 | FG syndrome |
| 309605 | Mental retardation, X-linked, syndromic-4, with congenital |
| | contractures and low fingertip arches |
| 312760 | Turner syndrome |
| 314250 | Dystonia-3, torsion, with parkinsonism, Filipino type |
| 314580 | Wieacker-Wolff syndrome |
| 600095 | Split hand/foot malformation, type 3 |
| 600202 | Dyslexia, specific, 2 |
| 600261 | Ehlers-Danlos-like syndrome |
| 600309 | Atrioventricular canal defect-1 |
| 600512 | Epilepsy, partial |
| 600835 | AIDS, resistance to |
| 601107 | Dubin-Johnson syndrome, 237500 |
| 601130 | Tolbutamide poor metabolizer |
| 601414 | Retinitis pigmentosa-18 |
| 601868 | Deafness, autosomal dominant 13 |
| 602082 | Corneal dystrophy, Thiel-Behnke type |
| 602094 | Lipodystrophy, familial partial |
| 602280 | Retinitis pigmentosa-14, 600132 |
| 602475 | Ossification of posterior longitudinal ligament of spine |

[0101] Polynucleotide and Polypeptide Variants

[0102] The present invention is directed to variants of the polynucleotide sequence disclosed in SEQ ID NO:X or the complementary strand thereto, nucleotide sequences encoding the polypeptide of SEQ ID NO:Y, the nucleotide sequence of SEQ ID NO:X encoding the polypeptide sequence as defined in column 7 of Table 1A, nucleotide sequences encoding the polypeptide as defined in column 7 of Table 1A, the nucleotide sequence as defined in columns 8 and 9 of Table 2, nucleotide sequences encoding the polypeptide encoded by the nucleotide sequence as defined in columns 8 and 9 of Table 2, the nucleotide sequence as defined in column 6 of Table 1B, nucleotide sequences encoding the polypeptide encoded by the nucleotide sequence as defined in column 6 of Table 1B, the cDNA sequence contained in Clone ID NO:Z, and/or nucleotide sequences encoding the polypeptide encoded by the cDNA sequence contained in Clone ID NO:Z.

[0103] The present invention also encompasses variants of the polypeptide sequence disclosed in SEQ ID NO:Y, the polypeptide sequence as defined in column 7 of Table 1A, a polypeptide sequence encoded by the polynucleotide sequence in SEQ ID NO:X, a polypeptide sequence encoded by the nucleotide sequence as defined in columns 8 and 9 of Table 2, a polypeptide sequence encoded by the nucleotide sequence as de fined in column 6 of Table 1B, a polypeptide sequence encoded by the complement of the polynucleotide sequence in SEQ ID NO:X, and/or a polypeptide sequence encoded by the cDNA sequence contained in Clone ID NO:Z.

[0104] “Variant” refers to a polynucleotide or polypeptide differing from the polynucleotide or polypeptide of the present invention, but retaining essential properties thereof. Generally, variants are overall closely similar, and, in many regions, identical to the polynucleotide or polypeptide of the present invention.

[0105] Thus, one aspect of the invention provides an isolated nucleic acid molecule comprising, or alternatively consisting of, a polynucleotide having a nucleotide sequence selected from the group consisting of: (a) a nucleotide sequence described in SEQ ID NO:X or contained in the cDNA sequence of Clone ID NO:Z; (b) a nucleotide sequence in SEQ ID NO:X or the cDNA in Clone ID NO:Z which encodes the complete amino acid sequence of SEQ ID NO:Y or the complete amino acid sequence encoded by the cDNA in Clone ID NO:Z; (c) a nucleotide sequence in SEQ ID NO:X or the cDNA in Clone ID NO:Z which encodes a mature polypeptide; (d) a nucleotide sequence in SEQ ID NO:X or the cDNA sequence of Clone ID NO:Z, which encodes a biologically active -fragment of a polypeptide; (e) a nucleotide sequence in SEQ ID NO:X or the cDNA sequence of Clone ID NO:Z, which encodes an antigenic fragment of a polypeptide; (f) a nucleotide sequence encoding a polypeptide comprising the complete amino acid sequence of SEQ ID NO:Y or the complete amino acid sequence encoded by the cDNA in Clone ID NO:Z; (g) a nucleotide sequence encoding a mature polypeptide of the amino acid sequence of SEQ ID NO:Y or the amino acid sequence encoded by the cDNA in Clone ID NO:Z; (h) a nucleotide sequence encoding a biologically active fragment of a polypeptide having the complete amino acid sequence of SEQ ID NO:Y or the complete amino acid sequence encoded by the cDNA in Clone ID NO:Z; (i) a nucleotide sequence encoding an antigenic fragment of a polypeptide having the complete amino acid sequence of SEQ ID NO:Y or the complete amino acid sequence encoded by the cDNA in Clone ID NO:Z; and (j) a nucleotide sequence complementary to any of the nucleotide sequences in (a), (b), (c), (d), (e), (f), (g), (h), or (i) above.

[0106] The present invention is also directed to nucleic acid molecules which comprise, or alternatively consist of, a nucleotide sequence which is at least 80%, 85%, 90%, 95%, 96%, 97%, 98%, 99% or 100%, identical to, for example, any of the nucleotide sequences in (a), (b), (c), (d), (e), (f), (g), (h), (i), or (j) above, the nucleotide coding sequence in SEQ ID NO:X or the complementary strand thereto, the nucleotide coding sequence of the cDNA contained in Clone ID NO:Z or the complementary strand thereto, a nucleotide sequence encoding the polypeptide of SEQ ID NO:Y, a nucleotide sequence encoding a polypeptide sequence encoded by the nucleotide sequence in SEQ ID NO:X, a polypeptide sequence encoded by the complement of the polynucleotide sequence in SEQ ID NO:X, a nucleotide sequence encoding the polypeptide encoded by the cDNA contained in Clone ID NO:Z, the nucleotide coding sequence in SEQ ID NO:X as defined in columns 8 and 9 of Table 2 or the complementary strand thereto, a nucleotide sequence encoding the polypeptide encoded by the nucleotide sequence in SEQ ID NO:X as defined in columns 8 and 9 of Table 2 or the complementary strand thereto, the nucleotide coding sequence in SEQ ID NO:B as defined in column 6 of Table 1B or the complementary strand thereto, a nucleotide sequence encoding the polypeptide encoded by the nucleotide sequence in SEQ ID NO:B as defined in column 6 of Table 1B or the complementary strand thereto, the nucleotide sequence in SEQ ID NO:X encoding the polypeptide sequence as defined in column 7 of Table 1A or the complementary strand thereto, nucleotide sequences encoding the polypeptide as defined in column 7 of Table 1A or the complementary strand thereto, and/or polynucleotide fragments of any of these nucleic acid molecules (e.g., those fragments described herein). Polynucleotides which hybridize to the complement of these nucleic acid molecules under stringent hybridization conditions or alternatively, under lower stringency conditions, are also encompassed by the invention, as are polypeptides encoded by these polynucleotides and nucleic acids.

[0107] In a preferred embodiment, the invention encompasses nucleic acid molecules which comprise, or alternatively, consist of a polynucleotide which hybridizes under stringent hybridization conditions, or alternatively, under lower stringency conditions, to a polynucleotide in (a), (b), (c), (d), (e), (f), (g), (h), or (i), above, as are polypeptides encoded by these polynucleotides. In another preferred embodiment, polynucleotides which hybridize to the complement of these nucleic acid molecules under stringent hybridization conditions, or alternatively, under lower stringency conditions, are also encompassed by the invention, as are polypeptides encoded by these polynucleotides.

[0108] In another embodiment, the invention provides a purified protein comprising, or alternatively consisting of, a polypeptide having an amino acid sequence selected from the group consisting of: (a) the complete amino acid sequence of SEQ ID NO:Y or the complete amino acid sequence encoded by the cDNA in Clone ID NO:Z; (b) the amino acid sequence of a mature form of a polypeptide having the amino acid sequence of SEQ ID NO:Y or the amino acid sequence encoded by the cDNA in Clone ID NO:Z; (c) the amino acid sequence of a biologically active fragment of a polypeptide having the complete amino acid sequence of SEQ ID NO:Y or the complete amino acid sequence encoded by the cDNA in Clone ID NO:Z; and (d) the amino acid sequence of an antigenic fragment of a polypeptide having the complete amino acid sequence of SEQ ID NO:Y or the complete amino acid sequence encoded by the cDNA in Clone ID NO:Z.

[0109] The present invention is also directed to proteins which comprise, or alternatively consist of, an amino acid sequence which is at least 80%, 85%, 90%, 95%, 96%, 97%, 98%, 99% or 100%, identical to, for example, any of the amino acid sequences in (a), (b), (c), or (d), above, the amino acid sequence shown in SEQ ID NO:Y, the amino acid sequence encoded by the cDNA contained in Clone ID NO:Z, the amino acid sequence of the polypeptide encoded by the nucleotide sequence in SEQ ID NO:X as defined in columns 8 and 9 of Table 2, the amino acid sequence of the polypeptide encoded by the nucleotide sequence in SEQ ID NO:B as defined in column 6 of Table 1B, the amino acid sequence as defined in column 7 of Table 1A, an amino acid sequence encoded by the nucleotide sequence in SEQ ID NO:X, and an amino acid sequence encoded by the complement of the polynucleotide sequence in SEQ ID NO:X. Fragments of these polypeptides are also provided (e.g., those fragments described herein). Further proteins encoded by polynucleotides which hybridize to the complement of the nucleic acid molecules encoding these amino acid sequences under stringent hybridization conditions or alternatively, under lower stringency conditions, are also encompassed by the invention, as are the polynucleotides encoding these proteins.

[0110] By a nucleic acid having a nucleotide sequence at least, for example, 95% “identical” to a reference nucleotide sequence of the present invention, it is intended that the nucleotide sequence of the nucleic acid is identical to the reference sequence except that the nucleotide sequence may include up to five point mutations per each 100 nucleotides of the reference nucleotide sequence encoding the polypeptide. In other words, to obtain a nucleic acid having a nucleotide sequence at least 95% identical to a reference nucleotide sequence, up to 5% of the nucleotides in the reference sequence may be deleted or substituted with another nucleotide, or a number of nucleotides up to 5% of the total nucleotides in the reference sequence may be inserted into the reference sequence. The query sequence may be an entire sequence referred to in Table 1A or 2 as the ORF (open reading frame), or any fragment specified as described herein.

[0111] As a practical matter, whether any particular nucleic acid molecule or polypeptide is at least 80%, 85%, 90%, 95%, 96%, 97%, 98% or 99% identical to a nucleotide sequence of the present invention can be determined conventionally using known computer programs. A preferred method for determining the best overall match between a query sequence (a sequence of the present invention) and a subject sequence, also referred to as a global sequence alignment, can be determined using the FASTDB computer program based on the algorithm of Brutlag et al. (Comp. App. Biosci. 6:237-245 (1990)). In a sequence alignment the query and subject sequences are both DNA sequences. An RNA sequence can be compared by converting U's to T's. The result of said global sequence alignment is expressed as percent identity. Preferred parameters used in a FASTDB alignment of DNA sequences to calculate percent identity are: Matrix=Unitary, k-tuple=4, Mismatch Penalty=1, Joining Penalty=30, Randomization Group Length=0, Cutoff Score=1, Gap Penalty=5, Gap Size Penalty 0.05, Window Size=500 or the length of the subject nucleotide sequence, whichever is shorter.

[0112] If the subject sequence is shorter than the query sequence because of 5′ or 3′ deletions, not because of internal deletions, a manual correction must be made to the results. This is because the FASTDB program does not account for 5′ and 3′ truncations of the subject sequence when calculating percent identity. For subject sequences truncated at the 5′ or 3′ ends, relative to the query sequence, the percent identity is corrected by calculating the number of bases of the query sequence that are 5′ and 3′ of the subject sequence, which are not matched/aligned, as a percent of the total bases of the query sequence. Whether a nucleotide is matched/aligned is determined by results of the FASTDB sequence alignment. This percentage is then subtracted from the percent identity, calculated by the above FASTDB program using the specified parameters, to arrive at a final percent identity score. This corrected score is what is used for the purposes of the present invention. Only bases outside the 5′ and 3′ bases of the subject sequence, as displayed by the FASTDB alignment, which are not matched/aligned with the query sequence, are calculated for the purposes of manually adjusting the percent identity score.

[0113] For example, a 90 base subject sequence is aligned to a 100 base query sequence to determine percent identity. The deletions occur at the 5′ end of the subject sequence and therefore, the FASTDB alignment does not show a matched/alignment of the first 10 bases at 5′ end. The 10 unpaired bases represent 10% of the sequence (number of bases at the 5′ and 3′ ends not matched/total number of bases in the query sequence) so 10% is subtracted from the percent identity score calculated by the FASTDB program. If the remaining 90 bases were perfectly matched the final percent identity would be 90%. In another example, a 90 base subject sequence is compared with a 100 base query sequence. This time the deletions are internal deletions so that there are no bases on the 5′ or 3′ of the subject sequence which are not matched/aligned with the query. In this case the percent identity calculated by FASTDB is not manually corrected. Once again, only bases 5′ and 3′ of the subject sequence which are not matched/aligned with the query sequence are manually corrected for. No other manual corrections are to be made for the purposes of the present invention.

[0114] By a polypeptide having an amino acid sequence at least, for example, 95% “identical” to a query amino acid sequence of the present invention, it is intended that the amino acid sequence of the subject polypeptide is identical to the query sequence except that the subject polypeptide sequence may include up to five amino acid alterations per each 100 amino acids of the query amino acid sequence. In other words, to obtain a polypeptide having an amino acid sequence at least 95% identical to a query amino acid sequence, up to 5% of the amino acid residues in the subject sequence may be inserted, deleted, (indels) or substituted with another amino acid. These alterations of the reference sequence may occur at the amino or carboxy terminal positions of the reference amino acid sequence or anywhere between those terminal positions, interspersed either individually among residues in the reference sequence or in one or more contiguous groups within the reference sequence.

[0115] As a practical matter, whether any particular polypeptide is at least 80%, 85%, 90%, 95%, 96%, 97%, 98% or 99% identical to, for instance, the amino acid sequence of a polypeptide referred to in Table 1A (e.g., the amino acid sequence identified in column 6) or Table 2 (e.g., the amino acid sequence of the polypeptide encoded by the polynucleotide sequence defined in columns 8 and 9 of Table 2) or a fragment thereof, the amino acid sequence of the polypeptide encoded by the polynucleotide sequence in SEQ ID NO:B as defined in column 6 of Table 1B or a fragment thereof, the amino acid sequence of the polypeptide encoded by the nucleotide sequence in SEQ ID NO:X or a fragment thereof, or 'the amino acid sequence of the polypeptide encoded by cDNA contained in Clone ID NO:Z, or a fragment thereof, can be determined conventionally using known computer programs. A preferred method for determining the best overall match between a query sequence (a sequence of the present invention) and a subject sequence, also referred to as a global sequence alignment, can be determined using the FASTDB computer program based on the algorithm of Brutlag et al. (Comp. App. Biosci.6:237-245 (1990)). In a sequence alignment the query and subject sequences are either both nucleotide sequences or both amino acid sequences. The result of said global sequence alignment is expressed as percent identity. Preferred parameters used in a FASTDB amino acid alignment are: Matrix=PAM 0, k-tuple=2, Mismatch Penalty=1, Joining Penalty=20, Randomization Group Length=0, Cutoff Score=1, Window Size=sequence length, Gap Penalty=5, Gap Size Penalty=0.05, Window Size=500 or the length of the subject amino acid sequence, whichever is shorter.

[0116] If the subject sequence is shorter than the query sequence due to N- or C-terminal deletions, not because of internal deletions, a manual correction must be made to the results. This is because the FASTDB program does not account for N- and C-terminal truncations of the subject sequence when calculating global percent identity. For subject sequences truncated at the N- and C-termini, relative to the query sequence, the percent identity is corrected by calculating the number of residues of the query sequence that are N- and C-terminal of the subject sequence, which are not matched/aligned with a corresponding subject residue, as a percent of the total bases of the query sequence. Whether a residue is matched/aligned is determined by results of the FASTDB sequence alignment. This percentage is then subtracted from the percent identity, calculated by the above FASTDB program using the specified parameters, to arrive at a final percent identity score. This final percent identity score is what is used for the purposes of the present invention. Only residues to the N- and C-termini of the subject sequence, which are not matched/aligned with the query sequence, are considered for the purposes of manually adjusting the percent identity score. That is, only query residue positions outside the farthest N- and C-terminal residues of the subject sequence.

[0117] For example, a 90 amino acid residue subject sequence is aligned with a 100 residue query sequence to determine percent identity. The deletion occurs at the N-terminus of the subject sequence and therefore, the FASTDB alignment does not show a matching/alignment of the first 10 residues at the N-terminus. The 10 unpaired residues represent 10% of the sequence (number of residues at the N- and C-termini not matched/total number of residues in the query sequence) so 10% is subtracted from the percent identity score calculated by the FASTDB program. If the remaining 90 residues were perfectly matched the final percent identity would be 90%. In another example, a 90 residue subject sequence is compared with a 100 residue query sequence. This time the deletions are internal deletions so there are no residues at the N- or C-termini of the subject sequence which are not matched/aligned with the query. In this case the percent identity calculated by FASTDB is not manually corrected. Once again, only residue positions outside the N- and C-terminal ends of the subject sequence, as displayed in the FASTDB alignment, which are not matched/aligned with the query sequnce are manually corrected for. No other manual corrections are to made for the purposes of the present invention.

[0118] The polynucleotide variants of the invention may contain alterations in the coding regions, non-coding regions, or both. Especially preferred are polynucleotide variants containing alterations which produce silent substitutions, additions, or deletions, but do not alter the properties or activities of the encoded polypeptide. Nucleotide variants produced by silent substitutions due to the degeneracy of the genetic code are preferred. Moreover, polypeptide variants in which less than 50, less than 40, less than 30, less than 20, less than 10, or 5-50, 5-25, 5-10, 1-5, or 1-2 amino acids are substituted, deleted, or added in any combination are also preferred. Polynucleotide variants can be produced for a variety of reasons, e.g., to optimize codon expression for a particular host (change codons in the human mRNA to those preferred by a bacterial host such as E. coli).

[0119] Naturally occurring variants are called “allelic variants,” and refer to one of several alternate forms of a gene occupying a given locus on a chromosome of an organism. (Genes II, Lewin, B., ed., John Wiley & Sons, New York (1985)). These allelic variants can vary at either the polynucleotide and/or polypeptide level and are included in the present invention. Alternatively, non-naturally occurring variants may be produced by mutagenesis techniques or by direct synthesis.

[0120] Using known methods of protein engineering and recombinant DNA technology, variants may be generated to improve or alter the characteristics of the polypeptides of the present invention. For instance, one or more amino acids can be deleted from the N-terminus or C-terminus of the polypeptide of the present invention without substantial loss of biological function. As an example, Ron et al. (J. Biol. Chem. 268: 2984-2988 (1993)) reported variant KGF proteins having heparin binding activity even after deleting 3, 8, or 27 amino-terminal amino acid residues. Similarly, Interferon gamma exhibited up to ten times higher activity after deleting 8-10 amino acid residues from the carboxy terminus of this protein. (Dobeli et al., J. Biotechnology 7:199-216 (1988).)

[0121] Moreover, ample evidence demonstrates that variants often retain a biological activity similar to that of the naturally occurring protein. For example, Gayle and coworkers (J. Biol. Chem. 268:22105-22111 (1993)) conducted extensive mutational analysis of human cytokine IL-1a. They used random mutagenesis to generate over 3,500 individual IL-1a mutants that averaged 2.5 amino acid changes per variant over the entire length of the molecule. Multiple mutations were examined at every possible amino acid position. The investigators found that “[m]ost of the molecule could be altered with little effect on either [binding or biological activity].” In fact, only 23 unique amino acid sequences, out of more than 3,500 nucleotide sequences examined, produced a protein that significantly differed in activity from wild-type.

[0122] Furthermore, even if deleting one or more amino acids from the N-terminus or C-terminus of a polypeptide results in modification or loss of one or more biological functions, other biological activities may still be retained. For example, the ability of a deletion variant to induce and/or to bind antibodies which recognize the secreted form will likely be retained when less than the majority of the residues of the secreted form are removed from the N-terminus or C-terminus. Whether a particular polypeptide lacking N- or C-terminal residues of a protein retains such immunogenic activities can readily be determined by routine methods described herein and otherwise known in the art.

[0123] Thus, the invention further includes polypeptide variants which show a functional activity (e.g., biological activity) of the polypeptides of the invention. Such variants include deletions, insertions, inversions, repeats, and substitutions selected according to general rules known in the art so as have little effect on activity.

[0124] The present application is directed to nucleic acid molecules at least 80%, 85%, 90%, 95%, 96%, 97%, 98%, 99% or 100% identical to the nucleic acid sequences disclosed herein, (e.g., encoding a polypeptide having the amino acid sequence of an N and/or C terminal deletion), irrespective of whether they encode a polypeptide having functional activity. This is because even where a particular nucleic acid molecule does not encode a polypeptide having functional activity, one of skill in the art would still know how to use the nucleic acid molecule, for instance, as a hybridization probe or a polymerase chain reaction (PCR) primer. Uses of the nucleic acid molecules of the present invention that do not encode a polypeptide having functional activity include, inter alia, (1) isolating a gene or allelic or splice variants thereof in a cDNA library; (2) in situ hybridization (e.g., “FISH”) to metaphase chromosomal spreads to provide precise chromosomal location of the gene, as described in Verma et al., Human Chromosomes: A Manual of Basic Techniques, Pergamon Press, New York (1988); (3) Northern Blot analysis for detecting mRNA expression in specific tissues (e.g., normal or diseased tissues); and (4) in situ hybridization (e.g., histochemistry) for detecting mRNA expression in specific tissues (e.g., normal or diseased tissues).

[0125] Preferred, however, are nucleic acid molecules having sequences at least 80%, 85%, 90%, 95%, 96%, 97%, 98%, 99% or 100% identical to the nucleic acid sequences disclosed herein, which do, in fact, encode a polypeptide having functional activity. By a polypeptide having “functional activity” is meant, a polypeptide capable of displaying one or more known functional activities associated with a fall-length (complete) protein of the invention. Such functional activities include, but are not limited to, biological activity, antigenicity [ability to bind (or compete with a polypeptide of the invention for binding) to an anti-polypeptide of the invention antibody], immunogenicity (ability to generate antibody which binds to a specific polypeptide of the invention), ability to form multimers with polypeptides of the invention, and ability to bind to a receptor or ligand for a polypeptide of the invention.

[0126] The functional activity of the polypeptides, and fragments, variants and derivatives of the invention, can be assayed by various methods.

[0127] For example, in one embodiment where one is assaying for the ability to bind or compete with a full-length polypeptide of the present invention for binding to an anti-polypetide antibody, various immunoassays known in the art can be used, including but not limited to, competitive and non-competitive assay systems using techniques such as radioimmunoassays, ELISA (enzyme linked immunosorbent assay), “sandwich” immunoassays, immunoradiometric assays, gel diffusion precipitation reactions, immunodiffusion assays, in situ immunoassays (using colloidal gold, enzyme or radioisotope labels, for example), western blots, precipitation reactions, agglutination assays (e.g., gel agglutination assays, hemagglutination assays), complement fixation assays, immunofluorescence assays, protein A assays, and immunoelectrophoresis assays, etc. In one embodiment, antibody binding is detected by detecting a label on the primary antibody. In another embodiment, the primary antibody is detected by detecting binding of a secondary antibody or reagent to the primary antibody. In a further embodiment, the secondary antibody is labeled. Many means are known in the art for detecting binding in an immunoassay and are within the scope of the present invention.

[0128] In another embodiment, where a ligand is identified, or the ability of a polypeptide fragment, variant or derivative of the invention to multimerize is being evaluated, binding can be assayed, e.g., by means well-known in the art, such as, for example, reducing and non-reducing gel chromatography, protein affinity chromatography, and affinity blotting. See generally, Phizicky et al., Microbiol. Rev. 59:94-123 (1995). In another embodiment, the ability of physiological correlates of a polypeptide of the present invention to bind to a substrate(s) of the polypeptide of the invention can be routinely assayed using techniques known in the art.

[0129] In addition, assays described herein (see Examples) and otherwise known in the art may routinely be applied to measure the ability of polypeptides of the present invention and fragments, variants and derivatives thereof to elicit polypeptide related biological activity (either in vitro or in vivo). Other methods will be known to the skilled artisan and are within the scope of the invention.

[0130] Of course, due to the degeneracy of the genetic code, one of ordinary skill in the art will immediately recognize that a large number of the nucleic acid molecules having a sequence at least 80%, 85%, 90%, 95%, 96%, 97%, 98%, 99%, or 100% identical to, for example, the nucleic acid sequence of the cDNA contained in Clone ID NO:Z, the nucleic acid sequence referred to in Table 1A (SEQ ID NO:X), the nucleic acid sequence disclosed in Table 2 (e.g., the nucleic acid sequence delineated in columns 8 and 9) or fragments thereof, will encode polypeptides “having functional activity.” In fact, since degenerate variants of any of these nucleotide sequences all encode the same polypeptide, in many instances, this will be clear to the skilled artisan even without performing the above described comparison assay. It will be further recognized in the art that, for such nucleic acid molecules that are not degenerate variants, a reasonable number will also encode a polypeptide having functional activity. This is because the skilled artisan is fully aware of amino acid substitutions that are either less likely or not likely to significantly effect protein function (e.g., replacing one aliphatic amino acid with a second aliphatic amino acid), as further described below.

[0131] For example, guidance concerning how to make phenotypically silent amino acid substitutions is provided in Bowie et al., “Deciphering the Message in Protein Sequences: Tolerance to Amino Acid Substitutions,” Science 247:1306-1310 (1990), wherein the authors indicate that there are two main strategies for studying the tolerance of an amino acid sequence to change.

[0132] The first strategy exploits the tolerance of amino acid substitutions by natural selection during the process of evolution. By comparing amino acid sequences in different species, conserved amino acids can be identified. These conserved amino acids are likely important for protein function. In contrast, the amino acid positions where substitutions have been tolerated by natural selection indicates that these positions are not critical for protein function. Thus, positions tolerating amino acid substitution could be modified while still maintaining biological activity of the protein.

[0133] The second strategy uses genetic engineering to introduce amino acid changes at specific positions of a cloned gene to identify regions critical for protein function. For example, site directed mutagenesis or alanine-scanning mutagenesis (introduction of single alanine mutations at every residue in the molecule) can be used. See Cunningham and Wells, Science 244:1081-1085 (1989). The resulting mutant molecules can then be tested for biological activity.

[0134] As the authors state, these two strategies have revealed that proteins are surprisingly tolerant of amino acid substitutions. The authors further indicate which amino acid changes are likely to be permissive at certain amino acid positions in the protein. For example, most buried (within the tertiary structure of the protein) amino acid residues require nonpolar side chains, whereas few features of surface side chains are generally conserved. Moreover, tolerated conservative amino acid substitutions involve replacement of the aliphatic or hydrophobic amino acids Ala, Val, Leu and Ile; replacement of the hydroxyl residues Ser and Thr; replacement of the acidic residues Asp and Glu; replacement of the amide residues Asn and Gln, replacement of the basic residues Lys, Arg, and His; replacement of the aromatic residues Phe, Tyr, and Trp, and replacement of the small-sized amino acids Ala, Ser, Thr, Met, and Gly. Besides conservative amino acid substitution, variants of the present invention include (i) substitutions with one or more of the non-conserved amino acid residues, where the substituted amino acid residues may or may not be one encoded by the genetic code, or (ii) substitutions with one or more of the amino acid residues having a substituent group, or (iii) fusion of the mature polypeptide with another compound, such as a compound to increase the stability and/or solubility of the polypeptide (for example, polyethylene glycol), (iv) fusion of the polypeptide with additional amino acids, such as, for example, an IgG Fc fusion region peptide, serum albumin (preferably human serum albumin) or a fragment thereof, or leader or secretory sequence, or a sequence facilitating purification, or (v) fusion of the polypeptide with another compound, such as albumin (including but not limited to recombinant albumin (see, e.g., U.S. Pat. No. 5,876,969, issued Mar. 2, 1999, EP Patent 0 413 622, and U.S. Pat. No. 5,766,883, issued Jun. 16, 1998, herein incorporated by reference in their entirety)). Such variant polypeptides are deemed to be within the scope of those skilled in the art from the teachings herein.

[0135] For example, polypeptide variants containing amino acid substitutions of charged amino acids with other charged or neutral amino acids may produce proteins with improved characteristics, such as less aggregation. Aggregation of pharmaceutical formulations both reduces activity and increases clearance due to the aggregate's immunogenic activity. See Pinckard et al., Clin. Exp. Immunol. 2:331-340 (1967); Robbins et al., Diabetes 36: 838-845 (1987); Cleland et al., Crit. Rev. Therapeutic Drug Carrier Systems 10:307-377 (1993).

[0136] A further embodiment of the invention relates to polypeptides which comprise the amino acid sequence of a polypeptide having an amino acid sequence which contains at least one amino acid substitution, but not more than 50 amino acid substitutions, even more preferably, not more than 40 amino acid substitutions, still more preferably, not more than 30 amino acid substitutions, and still even more preferably, not more than 20 amino acid substitutions from a polypeptide sequence disclosed herein. Of course it is highly preferable for a polypeptide to have an amino acid sequence which comprises the amino acid sequence of a polypeptide of SEQ ID NO:Y, an amino acid sequence encoded by SEQ ID NO:X, an amino acid sequence encoded by the portion of SEQ ID NO:X as defined in columnns 8 and 9 of Table 2, an amino acid sequence encoded by the complement of SEQ ID NO:X, and/or an amino acid sequence encoded by cDNA contained in Clone ID NO:Z which contains, in order of ever-increasing preference, at least one, but not more than 10, 9, 8, 7, 6, 5, 4, 3, 2 or 1 amino acid substitutions.

[0137] In specific embodiments, the polypeptides of the invention comprise, or alternatively, consist of, fragments or variants of a reference amino acid sequence selected from: (a) the amino acid sequence of SEQ ID NO:Y or fragments thereof (e.g., the mature form and/or other fragments described herein); (b) the amino acid sequence encoded by SEQ ID NO:X or fragments thereof; (c) the amino acid sequence encoded by the complement of SEQ ID NO:X or fragments thereof; (d) the amino acid sequence encoded by the portion of SEQ ID NO:X as defined in columns 8 and 9 of Table 2 or fragments thereof; and (e) the amino acid sequence encoded by cDNA contained in Clone ID NO:Z or fragments thereof; wherein the fragments or variants have 1-5, 5-10, 5-25, 5-50, 10-50 or 50-150, amino acid residue additions, substitutions, and/or deletions when compared to the reference amino acid sequence. In preferred embodiments, the amino acid substitutions are conservative. Polynucleotides encoding these polypeptides are also encompassed by the invention.

[0138] Polynucleotide and Polypeptide Fragments

[0139] The present invention is also directed to polynucleotide fragments of the polynucleotides (nucleic acids) of the invention. In the present invention, a “polynucleotide fragment” refers to a polynucleotide having a nucleic acid sequence which, for example: is a portion of the cDNA contained in Clone ID NO:Z or the complementary strand thereto; is a portion of the polynucleotide sequence encoding the polypeptide encoded by the cDNA contained in Clone ID NO:Z or the complementary strand thereto; is a portion of a polynucleotide sequence encoding the amino acid sequence encoded by the region of SEQ ID NO:X as defined in columns 8 and 9 of Table 2 or the complementary strand thereto; is a portion of the polynucleotide sequence of SEQ ID NO:X as defined in columns 8 and 9 of Table 2 or the complementary strand thereto; is a portion of the polynucleotide sequence in SEQ ID NO:X or the complementary strand thereto; is a polynucleotide sequence encoding a portion of the polypeptide of SEQ ID NO:Y; is a polynucleotide sequence encoding a portion of a polypeptide encoded by SEQ ID NO:X; is a polynucleotide sequence encoding a portion of a polypeptide encoded by the complement of the polynucleotide sequence in SEQ ID NO:X; is a portion of a polynucleotide sequence encoding the amino acid sequence encoded by the region of SEQ ID NO:B as defined in column 6 of Table 1B or the complementary strand thereto; or is a portion of the polynucleotide sequence of SEQ ID NO:B as defined in column 6 of Table 1B or the complementary strand thereto.

[0140] The polynucleotide fragments of the invention are preferably at least about 15 nt, and more preferably at least about 20 nt, still more preferably at least about 30 nt, and even more preferably, at least about 40 nt, at least about 50 nt, at least about 75 nt, or at least about 150 nt in length. A fragment “at least 20 nt in length,” for example, is intended to include 20 or more contiguous bases from the cDNA sequence contained in Clone ID NO:Z, or the nucleotide sequence shown in SEQ ID NO:X or the complementary stand thereto. In this context “about” includes the particularly recited value or a value larger or smaller by several (5, 4, 3, 2, or 1) nucleotides, at either terminus or at both termini. These nucleotide fragments have uses that include, but are not limited to, as diagnostic probes and primers as discussed herein. Of course, larger fragments (e.g., at least 160, 170, 180, 190, 200, 250, 500, 600, 1000, or 2000 nucleotides in length ) are also encompassed by the invention.

[0141] Moreover, representative examples of polynucleotide fragments of the invention comprise, or alternatively consist of, a sequence from about nucleotide number 1-50, 51-100, 101-150, 151-200, 201-250, 251-300, 301-350, 351-400, 401-450, 451-500, 501-550, 551-600, 601-650, 651-700, 701-750, 751-800, 801-850, 851-900, 901-950, 951-1000, 1001-1050, 1051-1100, 1101-1150, 1151-1200, 1201-1250, 1251-1300, 1301-1350, 1351-1400, 1401-1450, 1451-1500, 1501-1550, 1551-1600, 1601-1650, 1651-1700, 1701-1750, 1751-1800, 1801-1850, 1851-1900, 1901-1950, 1951-2000, 2001-2050, 2051-2100, 2101-2150, 2151-2200, 2201-2250, 2251-2300, 2301-2350, 2351-2400, 2401-2450, 2451-2500, 2501-2550, 2551-2600, 2601-2650, 2651-2700, 2701-2750, 2751-2800, 2801-2850, 2851-2900, 2901-2950, 2951-3000, 3001-3050, 3051-3100, 3101-3150, 3151-3200, 3201-3250, 3251-3300, 3301-3350, 3351-3400, 3401-3450, 3451-3500, 3501-3550, 3551-3600, 3601-3650, 3651-3700, 3701-3750, 3751-3800, 3801-3850, 3851-3900, 3901-3950, 3951-4000, 4001-4050, 4051-4100, 4101-4150, 4151-4200, 4201-4250, 4251-4300, 4301-4350, 4351-4400, 4401-4450, 4451-4500, 4501-4550, 4551-4600, 4601-4650, 4651-4700, 4701-4750, 4751-4800, 4801-4850, 4851-4900, 4901-4950, 4951-5000, 5001-5050, 5051-5100, 5101-5150, 5151-5200, 5201-5250, 5251-5300, 5301-5350, 5351-5400, 5401-5450, 5451-5500, 5501-5550, 5551-5600, 5601-5650, 5651-5700, 5701-5750, 5751-5800, 5801-5850, 5851-5900, 5901-5950, 5951-6000, 6001-6050, 6051-6100, 6101-6150, 6151-6200, 6201-6250, 6251-6300, 6301-6350, 6351-6400, 6401-6450, 6451-6500, 6501-6550, 6551-6600, 6601-6650, 6651-6700, 6701-6750, 6751-6800, 6801-6850, 6851-6900, 6901-6950, 6951-7000, 7001-7050, 7051-7100, 7101-7150, 7151-7200, 7201-7250, 7251-7300 or 7301 to the end of SEQ ID NO:X, or the complementary strand thereto. In this context “about” includes the particularly recited range or a range larger or smaller by several (5, 4, 3, 2, or 1) nucleotides, at either terminus or at both termini. Preferably, these fragments encode a polypeptide which has a functional activity (e.g., biological activity). More preferably, these polynucleotides can be used as probes or primers as discussed herein. Polynucleotides which hybridize to one or more of these polynucleotides under stringent hybridization conditions or alternatively, under lower stringency conditions are also encompassed by the invention, as are polypeptides encoded by these polynucleotides.

[0142] Further representative examples of polynucleotide fragments of the invention comprise, or alternatively consist of, a sequence from about nucleotide number 1-50, 51-100, 101-150, 151-200, 201-250, 251-300, 301-350, 351-400, 401-450, 451-500, 501-550, 551-600, 601-650, 651-700, 701-750, 751-800, 801-850, 851-900, 901-950, 951-1000, 1001-1050, 1051-1100, 1101-1150, 1151-1200, 1201-1250, 1251-1300, 1301-1350, 1351-1400, 1401-1450, 1451-1500, 1501-1550, 1551-1600, 1601-1650, 1651-1700, 1701-1750, 1751-1800, 1801-1850, 1851-1900, 1901-1950, 1951-2000, 2001-2050, 2051-2100, 2101-2150, 2151-2200, 2201-2250, 2251-2300, 2301-2350, 2351-2400, 2401-2450, 2451-2500, 2501-2550, 2551-2600, 2601-2650, 2651-2700, 2701-2750, 2751-2800, 2801-2850, 2851-2900, 2901-2950, 2951-3000, 3001-3050, 3051-3100, 3101-3150, 3151-3200, 3201-3250, 3251-3300, 3301-3350, 3351-3400, 3401-3450, 3451-3500, 3501-3550, 3551-3600, 3601-3650, 3651-3700, 3701-3750, 3751-3800, 3801-3850, 3851-3900, 3901-3950, 3951-4000, 4001-4050, 40514100, 4101-4150, 4151-4200, 4201-4250, 42514300, 4301-4350, 4351-4400, 4401-4450, 4451-4500, 4501-4550, 4551-4600, 4601-4650, 4651-4700, 4701-4750, 4751-4800, 48014850, 4851-4900, 4901-4950, 4951-5000, 5001-5050, 5051-5100, 5101-5150, 5151-5200, 5201-5250, 5251-5300, 5301-5350, 5351-5400, 5401-5450, 5451-5500, 5501-5550, 5551-5600, 5601-5650, 5651-5700, 5701-5750, 5751-5800, 5801-5850, 5851-5900, 5901-5950, 5951-6000, 6001-6050, 6051-6100, 6101-6150, 6151-6200, 6201-6250, 6251-6300, 6301-6350, 6351-6400, 6401-6450, 6451-6500, 6501-6550, 6551-6600, 6601-6650, 6651-6700, 6701-6750, 6751-6800, 6801-6850, 6851-6900, 6901-6950, 6951-7000, 7001-7050, 7051-7100, 7101-7150, 7151-7200, 7201-7250, 7251-7300 or 7301 to the end of the cDNA sequence contained in Clone ID NO:Z, or the complementary strand thereto. In this context “about” includes the particularly recited range or a range larger or smaller by several (5, 4, 3, 2, or 1) nucleotides, at either terminus or at both termini. Preferably, these fragments encode a polypeptide which has a functional activity (e.g., biological activity). More preferably, these polynucleotides can be used as probes or primers as discussed herein. Polynucleotides which hybridize to one or more of these polynucleotides under stringent hybridization conditions or alternatively, under lower stringency conditions are also encompassed by the invention, as are polypeptides encoded by these polynucleotides.

[0143] Moreover, representative examples of polynucleotide fragments of the invention comprise, or alternatively consist of, a nucleic acid sequence comprising one, two, three, four, five, six, seven, eight, nine, ten, or more of the above described polynucleotide fragments of the invention in combination with a polynucleotide sequence delineated in Table 1B column 6. Additional, representative examples of polynucleotide fragments of the invention comprise, or alternatively consist of, a nucleic acid sequence comprising one, two, three, four, five, six, seven, eight, nine, ten, or more of the above described polynucleotide fragments of the invention in combination with a polynucleotide sequence that is the complementary strand of a sequence delineated in column 6 of Table 1B. In further embodiments, the above-described polynucleotide fragments of the invention comprise, or alternatively consist of, sequences delineated in Table 1B, column 6, and have a nucleic acid sequence which is different from that of the BAC fragment having the sequence disclosed in SEQ ID NO:B (see Table 1B, column 5). In additional embodiments, the above-described polynucleotide fragments of the invention comprise, or alternatively consist of, sequences delineated in Table 1B, column 6, and have a nucleic acid sequence which is different from that published for the BAC clone identified as BAC ID NO:A (see Table 1B, column 4). In additional embodiments, the above-described polynucleotides of the invention comprise, or alternatively consist of, sequences delineated Table 1B, column 6, and have a nucleic acid sequence which is different from that contained in the BAC clone identified as BAC ID NO:A (see Table 1B, column 4). Polypeptides encoded by these polynucleotides, other polynucleotides that encode these polypeptides, and antibodies that bind these polypeptides are also encompassed by the invention. Additionally, fragments and variants of the above-described polynucleotides and polypeptides are also encompassed by the invention.

[0144] In additional specific embodiments, polynucleotides of the invention comprise, or alternatively consist of, one, two, three, four, five, six, seven, eight, nine, ten, or more fragments of the sequences delineated in column 6 of Table 1B, and the polynucleotide sequence of SEQ ID NO:X (e.g., as defined in Table 1B, column 2) or fragments or variants thereof. Polypeptides encoded by these polynucleotides, other polynucleotides that encode these polypeptides, and antibodies that bind these polypeptides are also encompassed by the invention.

[0145] In additional specific embodiments, polynucleotides of the invention comprise, or alternatively consist of, one, two, three, four, five, six, seven, eight, nine, ten, or more fragments of the sequences delineated in column 6 of Table 1B which correspond to the same Clone ID NO:Z (see Table 1B, column 1), and the polynucleotide sequence of SEQ ID NO:X (e.g., as defined in Table 1A or 1B) or fragments or variants thereof. Polypeptides encoded by these polynucleotides, other polynucleotides that encode these polypeptides, and antibodies that bind these polypeptides are also encompassed by the invention.

[0146] In further specific embodiments, polynucleotides of the invention comprise, or alternatively consist of, one, two, three, four, five, six, seven, eight, nine, ten, or more fragments of the sequences delineated in the same row of column 6 of Table 1B, and the polynucleotide sequence of SEQ ID NO:X (e.g., as defined in Table 1A or 1B) or fragments or variants thereof. Polypeptides encoded by these polynucleotides, other polynucleotides that encode these polypeptides, and antibodies that bind these polypeptides are also encompassed by the invention.

[0147] In additional specific embodiments, polynucleotides of the invention comprise, or alternatively consist of a polynucleotide sequence in which the 3′ 10 polynucleotides of one of the sequences delineated in column 6 of Table 1B and the 5′ 10 polynucleotides of the sequence of SEQ ID NO:X are directly contiguous. Nucleic acids which hybridize to the complement of these 20 contiguous polynucleotides under stringent hybridization conditions or alternatively, under lower stringency conditions, are also encompassed by the invention. Polypeptides encoded by these polynucleotides and/or nucleic acids, other polynucleotides and/or nucleic acids that encode these polypeptides, and antibodies that bind these polypeptides are also encompassed by the invention. Additionally, fragments and variants of the above-described polynucleotides, nucleic acids, and polypeptides are also encompassed by the invention.

[0148] In additional specific embodiments, polynucleotides of the invention comprise, or alternatively consist of a polynucleotide sequence in which the 3′ 10 polynucleotides of one of the sequences delineated in column 6 of Table 1B and the 5′ 10 polynucleotides of a fragment or variant of the sequence of SEQ ID NO:X (e.g., as described herein) are directly contiguous Nucleic acids which hybridize to the complement of these 20 contiguous polynucleotides under stringent hybridization conditions or alternatively, under lower stringency conditions, are also encompassed by the invention. Polypeptides encoded by these polynucleotides and/or nucleic acids, other polynucleotides and/or nucleic acids encoding these polypeptides, and antibodies that bind these polypeptides are also encompassed by the invention. Additionally, fragments and variants of the above-described polynucleotides, nucleic acids, and polypeptides are also encompassed by the invention.

[0149] In further specific embodiments, polynucleotides of the invention comprise, or alternatively consist of a polynucleotide sequence in which the 3′ 10 polynucleotides of a fragment or variant of the sequence of SEQ ID NO:X and the 5′ 10 polynucleotides of the sequence of one of the sequences delineated in column 6 of Table 1B are directly contiguous. Nucleic acids which hybridize to the complement of these 20 contiguous polynucleotides under stringent hybridization conditions or alternatively, under lower stringency conditions, are also encompassed by the invention. Polypeptides encoded by these polynucleotides and/or nucleic acids, other polynucleotides and/or nucleic acids encoding these polypeptides, and antibodies that bind these polypeptides are also encompassed by the invention. Additionally, fragments and variants of the above-described polynucleotides, nucleic acids, and polypeptides are also encompassed by the invention.

[0150] In specific embodiments, polynucleotides of the invention comprise, or alternatively consist of a polynucleotide sequence in which the 3′ 10 polynucleotides of one of the sequences delineated in column 6 of Table 1B and the 5′ 10 polynucleotides of another sequence in column 6 are directly contiguous. In preferred embodiments, the 3′ 10 polynucleotides of one of the sequences delineated in column 6 of Table 1B is directly contiguous with the 5′ 10 polynucleotides of the next sequential exon delineated in Table 1B, column 6. Nucleic acids which hybridize to the complement of these 20 contiguous polynucleotides under stringent hybridization conditions or alternatively, under lower stringency conditions, are also encompassed by the invention. Polypeptides encoded by these polynucleotides and/or nucleic acids, other polynucleotides and/or nucleic acids encoding these polypeptides, and antibodies that bind these polypeptides are also encompassed by the invention. Additionally, fragments and variants of the above-described polynucleotides, nucleic acids, and polypeptides are also encompassed by the invention.

[0151] In the present invention, a “polypeptide fragment” refers to an amino acid sequence which is a portion of that contained in SEQ ID NO:Y, a portion of an amino acid sequence encoded by the portion of SEQ ID NO:X as defined in columnns 8 and 9 of Table 2, a portion of an amino acid sequence encoded by the polynucleotide sequence of SEQ ID NO:X, a portion of an amino acid sequence encoded by the complement of the polynucleotide sequence in SEQ ID NO:X, and/or a portion of an amino acid sequence encoded by the cDNA contained in Clone ID NO:Z. Protein (polypeptide) fragments may be “free-standing,” or comprised within a larger polypeptide of which the fragment forms a part or region, most preferably as a single continuous region. Representative examples of polypeptide fragments of the invention, include, for example, fragments comprising, or alternatively consisting of, from about amino acid number 1-20, 21-40, 41-60, 61-80, 81-100, 101-120, 121-140, 141-160, 161-180, 181-200, 201-220, 221-240, 241-260, 261-280, 281-300, 301-320, 321-340, 341-360, 361-380, 381-400, 401-420, 421-440, 441-460, 461-480, 481-500, 501-520, 521-540, 541-560, 561-580, 581-600, 601-620, 621-640, 641-660, 661-680, 681-700, 701-720, 721-740, 741-760, 761-780, 781-800, 801-820, 821-840, 841-860, 861-880, 881-900, 901-920, 921-940, 941-960, 961-980, 981-1000, 1001-1020, 1021-1040, 1041-1060, 1061-1080, 1081-1100, 1101-1120, 1121-1140, 1141-1160, 1161-1180, 1181-1200, 1201-1220, 1221-1240, 1241-1260, 1261-1280, 1281-1300, 1301-1320, 1321-1340, 1341-1360, 1361-1380, 1381-1400, 1401-1420, 1421-1440, or 1441 to the end of the coding region of cDNA and SEQ ID NO: Y. In a preferred embodiment, polypeptide fragments of the invention include, for example, fragments comprising, or alternatively consisting of, from about amino acid number 1-20, 21-40, 41-60, 61-80, 81-100, 101-120, 121-140, 141-160, 161-180, 181-200, 201-220, 221-240, 241-260, 261-280, 281-300, 301-320, 321-340, 341-360, 361-380, 381-400, 401-420, 421-440, 441-460, 461-480, 481-500, 501-520, 521-540, 541-560, 561-580, 581-600, 601-620, 621-640, 641-660, 661-680, 681-700, 701-720, 721-740, 741-760, 761-780, 781-800, 801-820, 821-840, 841-860, 861-880, 881-900, 901-920, 921-940, 941-960, 961-980, 981-1000, 1001-1020, 1021-1040, 1041-1060, 1061-1080, 1081-1100, 1101-1120, 1121-1140, 1141-1160, 1161-1180, 1181-1200, 1201-1220, 1221-1240, 1241-1260, 1261-1280, 1281-1300, 1301-1320, 1321-1340, 1341-1360, 1361-1380, 1381-1400, 1401-1420, 1421-1440, or 1441 to the end of the coding region of SEQ ID NO:Y. Moreover, polypeptide fragments of the invention may be at least about 10, 15, 20, 25, 30, 35, 40, 45, 50, 55, 60, 65, 70, 75, 80, 85, 90, 100, 110, 120, 130, 140, or 150 amino acids in length. In this context “about” includes the particularly recited ranges or values, or ranges or values larger or smaller by several (5, 4, 3, 2, or 1) amino acids, at either extreme or at both extremes. Polynucleotides encoding these polypeptide fragments are also encompassed by the invention.

[0152] Even if deletion of one or more amino acids from the N-terminus of a protein results in modification of loss of one or more biological functions of the protein, other functional activities (e.g., biological activities, ability to multimerize, ability to bind a ligand) may still be retained. For example, the ability of shortened muteins to induce and/or bind to antibodies which recognize the complete or mature forms of the polypeptides generally will be retained when less than the majority of the residues of the complete or mature polypeptide are removed from the N-terminus. Whether a particular polypeptide lacking N-terminal residues of a complete polypeptide retains such immunologic activities can readily be determined by routine methods described herein and otherwise known in the art. It is not unlikely that a mutein with a large number of deleted N-terminal amino acid residues may retain some biological or immunogenic activities. In fact, peptides composed of as few as six amino acid residues may often evoke an immune response.

[0153] Accordingly, polypeptide fragments include the secreted protein as well as the mature form. Further preferred polypeptide fragments include the secreted protein or the mature form having a continuous series of deleted residues from the amino or the carboxy terminus, or both. For example, any number of amino acids, ranging from 1-60, can be deleted from the amino terminus of either the secreted polypeptide or the mature form. Similarly, any number of amino acids, ranging from 1-30, can be deleted from the carboxy terminus of the secreted protein or mature form. Furthermore, any combination of the above amino and carboxy terminus deletions are preferred. Similarly, polynucleotides encoding these polypeptide fragments are also preferred.

[0154] The present invention further provides polypeptides having one or more residues deleted from the amino terminus of the amino acid sequence of a polypeptide disclosed herein (e.g., a polypeptide of SEQ ID NO:Y, a polypeptide encoded by the polynucleotide sequence contained in SEQ ID NO:X or the complement thereof, a polypeptide encoded by the portion of SEQ ID NO:X as defined in columns 8 and 9 of Table 2, a polypeptide encoded by the portion of SEQ ID NO:B as defined in column 6 of Table 1B, and/or a polypeptide encoded by the cDNA contained in Clone ID NO:Z). In particular, N-terminal deletions may be described by the general formula m-q, where q is a whole integer representing the total number of amino acid residues in a polypeptide of the invention (e.g., the polypeptide disclosed in SEQ ID NO:Y, or the polypeptide encoded by the portion of SEQ ID NO:X as defined in columns 8 and 9 of Table 2), and m is defined as any integer ranging from 2 to q-6. Polynucleotides encoding these polypeptides are also encompassed by the invention.

[0155] The present invention further provides polypeptides having one or more residues from the carboxy terminus of the amino acid sequence of a polypeptide disclosed herein (e.g., a polypeptide of SEQ ID NO:Y, a polypeptide encoded by the polynucleotide sequence contained in SEQ ID NO:X, a polypeptide encoded by the portion of SEQ ID NO:X as defined in columns 8 and 9 of Table 2, and/or a polypeptide encoded by the cDNA contained in Clone ID NO:Z). In particular, C-terminal deletions may be described by the general formula 1-n, where n is any whole integer ranging from 6 to q-1, and where n corresponds to the position of amino acid residue in a polypeptide of the invention. Polynucleotides encoding these polypeptides are also encompassed by the invention.

[0156] In addition, any of the above described N- or C-terminal deletions can be combined to produce a N- and C-terminal deleted polypeptide. The invention also provides polypeptides having one or more amino acids deleted from both the amino and the carboxyl termini, which may be described generally as having residues m-n of a polypeptide encoded by SEQ ID NO:X (e.g., including, but not limited to, the preferred polypeptide disclosed as SEQ ID NO:Y and the polypeptide encoded by the portion of SEQ ID NO:X as defined in columns 8 and 9 of Table 2), the cDNA contained in Clone ID NO:Z, and/or the complement thereof, where n and m are integers as described above. Polynucleotides encoding these polypeptides are also encompassed by the invention.

[0157] Also as mentioned above, even if deletion of one or more amino acids from the C-terminus of a protein results in modification of loss of one or more biological functions of-the protein, other functional activities (e.g., biological activities, ability to multimerize, ability to bind a ligand) may still be retained. For example the ability of the shortened mutein to induce and/or bind to antibodies which recognize the complete or mature forms of the polypeptide generally will be retained when less than the majority of the residues of the complete or mature polypeptide are removed from the C-terminus. Whether a particular polypeptide lacking C-terminal residues of a complete polypeptide retains such immunologic activities can readily be determined by routine methods described herein and otherwise known in the art. It is not unlikely that a mutein with a large number of deleted C-terminal amino acid residues may retain some biological or immunogenic activities. In fact, peptides composed of as few as six amino acid residues may often evoke an immune response.

[0158] The present application is also directed to proteins containing polypeptides at least 80%, 85%, 90%, 95%, 96%, 97%, 98% or 99% identical to a polypeptide sequence set forth herein. In preferred embodiments, the application is directed to proteins containing polypeptides at least 80%, 85%, 90%, 95%, 96%, 97%, 98% or 99% identical to polypeptides having the amino acid sequence of the specific N- and C-terminal deletions. Polynucleotides encoding these polypeptides are also encompassed by the invention.

[0159] Any polypeptide sequence encoded by, for example, the polynucleotide sequences set forth as SEQ ID NO:X or the complement thereof, (presented, for example, in Tables 1A and 2), the cDNA contained in Clone ID NO:Z, or the polynucleotide sequence as defined in column 6 of Table 1B, may be analyzed to determine certain preferred regions of the polypeptide. For example, the amino acid sequence of a polypeptide encoded by a polynucleotide sequence of SEQ ID NO:X (e.g., the polypeptide of SEQ ID NO:Y and the polypeptide encoded by the portion of SEQ ID NO:X as defined in columnns 8 and 9 of Table 2) or the cDNA contained in Clone ID NO:Z may be analyzed using, the default parameters of the DNASTAR computer algorithm (DNASTAR, Inc., 1228 S. Park St., Madison, Wis. 53715 USA; http://www.dnastar.com/).

[0160] Polypeptide regions that may be routinely obtained using the DNASTAR computer algorithm include, but are not limited to, Garnier-Robson alpha-regions, beta-regions, turn-regions, and coil-regions; Chou-Fasman alpha-regions, beta-regions, and turn-regions; Kyte-Doolittle hydrophilic regions and hydrophobic regions; Eisenberg alpha- and beta-amphipathic regions; Karplus-Schulz flexible regions; Emini surface-forming regions; and Jameson-Wolf regions of high antigenic index. Among highly preferred polynucleotides of the invention in this regard are those that encode polypeptides comprising regions that combine several structural features, such as several (e.g., 1, 2, 3 or 4) of the features set out above.

[0161] Additionally, Kyte-Doolittle hydrophilic regions and hydrophobic regions, Emini surface-forming regions, and Jameson-Wolf regions of high antigenic index (i.e., containing four or more contiguous amino acids having an antigenic index of greater than or equal to 1.5, as identified using the default parameters of the Jameson-Wolf program) can routinely be used to determine polypeptide regions that exhibit a high degree of potential for antigenicity. Regions of high antigenicity are determined from data by DNASTAR analysis by choosing values which represent regions of the polypeptide which are likely to be exposed on the surface of the polypeptide in an environment in which antigen recognition may occur in the process of initiation of an immune response.

[0162] Preferred polypeptide fragments of the invention are fragments comprising, or alternatively, consisting of, an amino acid sequence that displays a functional activity (e.g. biological activity) of the polypeptide sequence of which the amino acid sequence is a fragment. By a polypeptide displaying a “functional activity” is meant a polypeptide capable of one or more known functional activities associated with a full-length protein, such as, for example, biological activity, antigenicity, immunogenicity, and/or multimerization, as described herein.

[0163] Other preferred polypeptide fragments are biologically active fragments. Biologically active fragments are those exhibiting activity similar, but not necessarily identical, to an activity of the polypeptide of the present invention. The biological activity of the fragments may include an improved desired activity, or a decreased undesirable activity.

[0164] In preferred embodiments, polypeptides of the invention comprise, or alternatively consist of, one, two, three, four, five or more of the antigenic fragments of the polypeptide of SEQ ID NO:Y, or portions thereof. Polynucleotides encoding these polypeptides are also encompassed by the invention.

[0165] The present invention encompasses polypeptides comprising, or alternatively consisting of, an epitope of: the polypeptide sequence shown in SEQ ID NO:Y; a polypeptide sequence encoded by SEQ ID NO:X or the complementary strand thereto; the polypeptide sequence encoded by the portion of SEQ ID NO:X as defined in columns 8 and 9 of Table 2; the polypeptide sequence encoded by the portion of SEQ ID NO:B as defined in column 6 of Table 1B or the complement thereto; the polypeptide sequence encoded by the cDNA contained in Clone ID NO:Z; or the polypeptide sequence encoded by a polynucleotide that hybridizes to the sequence of SEQ ID NO:X, the complement of the sequence of SEQ ID NO:X, the complement of a portion of SEQ ID NO:X as defined in columns 8 and 9 of Table 2, or the cDNA sequence contained in Clone ID NO:Z under stringent hybridization conditions or alternatively, under lower stringency hybridization as defined supra. The present invention further encompasses polynucleotide sequences encoding an epitope of a polypeptide sequence of the invention (such as, for example, the sequence disclosed in SEQ ID NO:X, or a fragment thereof), polynucleotide sequences of the complementary strand of a polynucleotide sequence encoding an epitope of the invention, and polynucleotide sequences which hybridize to the complementary strand under stringent hybridization conditions or alternatively, under lower stringency hybridization conditions defined supra.

[0166] The term “epitopes,” as used herein, refers to portions of a polypeptide having antigenic or immunogenic activity in an animal, preferably a mammal, and most preferably in a human. In a preferred embodiment, the present invention encompasses a polypeptide comprising an epitope, as well as the polynucleotide encoding this polypeptide. An “immunogenic epitope,” as used herein, is defined as a portion of a protein that elicits an antibody response in an animal, as determined by any method known in the art, for example, by the methods for generating antibodies described infra. (See, for example, Geysen et al., Proc. Natl. Acad. Sci. USA 81:3998-4002 (1983)). The term “antigenic epitope,” as used herein, is defined as a portion of a protein to which an antibody can immunospecifically bind its antigen as determined by any method well known in the art, for example, by the immunoassays described herein. Immunospecific binding excludes non-specific binding but does not necessarily exclude cross-reactivity with other antigens. Antigenic epitopes need not necessarily be immunogenic.

[0167] Fragments which function as epitopes may be produced by any conventional means. (See, e.g., Houghten, R. A., Proc. Natl. Acad. Sci. USA 82:5131-5135 (1985) further described in U.S. Pat. No. 4,631,211.)

[0168] In the present invention, antigenic epitopes preferably contain a sequence of at least 4, at least 5, at least 6, at least 7, more preferably at least 8, at least 9, at least 10, at least 11, at least 12, at least 13, at least 14, at least 15, at least 20, at least 25, at least 30, at least 40, at least 50, and, most preferably, between about 15 to about 30 amino acids. Preferred polypeptides comprising immunogenic or antigenic epitopes are at least 10, 15, 20, 25, 30, 35, 40, 45, 50, 55, 60, 65, 70, 75, 80, 85, 90, 95, or 100 amino acid residues in length. Additional non-exclusive preferred antigenic epitopes include the antigenic epitopes disclosed herein, as well as portions thereof. Antigenic epitopes are useful, for example, to raise antibodies, including monoclonal antibodies, that specifically bind the epitope. Preferred antigenic epitopes include the antigenic epitopes disclosed herein, as well as any combination of two, three, four, five or more of these antigenic epitopes. Antigenic epitopes can be used as the target molecules in immunoassays. (See, for instance, Wilson et al., Cell 37:767-778 (1984); Sutcliffe et al., Science 219:660-666 (1983)).

[0169] Non-limiting examples of epitopes of polypeptides that can be used to generate antibodies of the invention include a polypeptide comprising, or alternatively consisting of, at least one, two, three, four, five, six or more of the portion(s) of SEQ ID NO:Y specified in column 7 of Table 1A. These polypeptide fragments have been determined to bear antigenic epitopes of the proteins of the invention by the analysis of the Jameson-Wolf antigenic index which is included in the DNAStar suite of computer programs. By “comprise” it is intended that a polypeptide contains at least one, two, three, four, five, six or more of the portion(s) of SEQ ID NO:Y shown in column 7 of Table 1A, but it may contain additional flanking residues on either the amino or carboxyl termini of the recited portion. Such additional flanking sequences are preferably sequences naturally found adjacent to the portion; i.e., contiguous sequence shown in SEQ ID NO:Y. The flanking sequence may, however, be sequences from a heterolgous polypeptide, such as from another protein described herein or from a heterologous polypeptide not described herein. In particular embodiments, epitope portions of a polypeptide of the invention comprise one, two, three, or more of the portions of SEQ ID NO:Y shown in column 7 of Table 1A.

[0170] Similarly, immunogenic epitopes can be used, for example, to induce antibodies according to methods well known in the art. See, for instance, Sutcliffe et al., supra; Wilson et al., supra; Chow et al., Proc. Natl. Acad. Sci. USA 82:910-914; and Bittle et al., J. Gen. Virol. 66:2347-2354 (1985). Preferred immunogenic epitopes include the immunogenic epitopes disclosed herein, as well as any combination of two, three, four, five or more of these immunogenic epitopes. The polypeptides comprising one or more immunogenic epitopes may be presented for eliciting an antibody response together with a carrier protein, such as an albumin, to an animal system (such as rabbit or mouse), or, if the polypeptide is of sufficient length (at least about 25 amino acids), the polypeptide may be presented without a carrier. However, immunogenic epitopes comprising as few as 8 to 10 amino acids have been shown to be sufficient to raise antibodies capable of binding to, at the very least, linear epitopes in a denatured polypeptide (e.g., in Western blotting).

[0171] Epitope-bearing polypeptides of the present invention may be used to induce antibodies according to methods well known in the art including, but not limited to, in vivo immunization, in vitro immunization, and phage display methods. See, e.g., Sutcliffe et al., supra; Wilson et al., supra, and Bittle et al., J. Gen. Virol., 66:2347-2354 (1985). If in vivo immunization is used, animals may be immunized with free peptide; however, anti-peptide antibody titer may be boosted by coupling the peptide to a macromolecular carrier, such as keyhole limpet hemacyanin (KLH) or tetanus toxoid. For instance, peptides containing cysteine residues may be coupled to a carrier using a linker such as maleimidobenzoyl-N-hydroxysuccinimide ester (MBS), while other peptides may be coupled to carriers using a more general linking agent such as glutaraldehyde. Animals such as rabbits, rats and mice are immunized with either free or carrier-coupled peptides, for instance, by intraperitoneal and/or intradermal injection of emulsions containing about 100 μg of peptide or carrier protein and Freund's adjuvant or any other adjuvant known for stimulating an immune response. Several booster injections may be needed, for instance, at intervals of about two weeks, to provide a useful titer of anti-peptide antibody which can be detected, for example, by ELISA assay using free peptide adsorbed to a solid surface. The titer of anti-peptide antibodies in serum from an immunized animal may be increased by selection of anti-peptide antibodies, for instance, by adsorption to the peptide on a solid support and elution of the selected antibodies according to methods well known in the art.

[0172] As one of skill in the art will appreciate, and as discussed above, the polypeptides of the present invention (e.g., those comprising an immunogenic or antigenic epitope) can be fused to heterologous polypeptide sequences. For example, polypeptides of the present invention (including fragments or variants thereof), may be fused with the constant domain of immunoglobulins (IgA, IgE, IgG, IgM), or portions thereof (CH1, CH2, CH3, or any combination thereof and portions thereof, resulting in chimeric polypeptides. By way of another non-limiting example, polypeptides and/or antibodies of the present invention (including fragments or variants thereof) may be fused with albumin (including but not limited to recombinant human serum albumin or fragments or variants thereof (see, e.g., U.S. Pat. No. 5,876,969, issued Mar. 2, 1999, EP Patent 0 413 622, and U.S. Pat. No. 5,766,883, issued Jun. 16, 1998, herein incorporated by reference in their entirety)). In a preferred embodiment, polypeptides and/or antibodies of the present invention (including fragments or variants thereof) are fused with the mature form of human serum albumin (i.e., amino acids 1-585 of human serum albumin as shown in FIGS. 1 and 2 of EP Patent 0 322 094) which is herein incorporated by reference in its entirety. In another preferred embodiment, polypeptides and/or antibodies of the present invention (including fragments or variants thereof) are fused with polypeptide fragments comprising, or alternatively consisting of, amino acid residues 1-z of human serum albumin, where z is an integer from 369 to 419, as described in U.S. Pat. No. 5,766,883 herein incorporated by reference in its entirety. Polypeptides and/or antibodies of the present invention (including fragments or variants thereof) may be fused to either the N- or C-terminal end of the heterologous protein (e.g., immunoglobulin Fc polypeptide or human serum albumin polypeptide). Polynucleotides encoding fusion proteins of the invention are also encompassed by the invention.

[0173] Such fusion proteins as those described above may facilitate purification and may increase half-life in vivo. This has been shown for chimeric proteins consisting of the first two domains of the human CD4-polypeptide and various domains of the constant regions of the heavy or light chains of mammalian immunoglobulins. See, e.g., EP 394,827; Traunecker et al., Nature, 331:84-86 (1988). Enhanced delivery of an antigen across the epithelial barrier to the immune system has been demonstrated for antigens (e.g., insulin) conjugated to an FcRn binding partner such as IgG or Fc fragments (see, e.g., PCT Publications WO 96/22024 and WO 99/04813). IgG fusion proteins that have a disulfide-linked dimeric structure due to the IgG portion desulfide bonds have also been found to be more efficient in binding and neutralizing other molecules than monomeric polypeptides or fragments thereof alone. See, e.g., Fountoulakis et al., J. Biochem., 270:3958-3964 (1995). Nucleic acids encoding the above epitopes can also be recombined with a gene of interest as an epitope tag (e.g., the hemagglutinin (HA) tag or flag tag) to aid in detection and purification of the expressed polypeptide. For example, a system described by Janknecht et al. allows for the ready purification of non-denatured fusion proteins expressed in human cell lines (Janknecht et al., 1991, Proc. Natl. Acad. Sci. USA 88:8972-897). In this system, the gene of interest is subcloned into a vaccinia recombination plasmid such that the open reading frame of the gene is translationally fused to an amino-terminal tag consisting of six histidine residues. The tag serves as a matrix binding domain for the fusion protein. Extracts from cells infected with the recombinant vaccinia virus are loaded onto Ni2+ nitriloacetic acid-agarose column and histidine-tagged proteins can be selectively eluted with imidazole-containing buffers.

[0174] Fusion Proteins

[0175] Any polypeptide of the present invention can be used to generate fusion proteins. For example, the polypeptide of the present invention, when fused to a second protein, can be used as an antigenic tag. Antibodies raised against the polypeptide of the present invention can be used to indirectly detect the second protein by binding to the polypeptide. Moreover, because secreted proteins target cellular locations based on trafficking signals, polypeptides of the present invention which are shown to be secreted can be used as targeting molecules once fused to other proteins.

[0176] Examples of domains that can be fused to polypeptides of the present invention include not only heterologous signal sequences, but also other heterologous functional regions. The fusion does not necessarily need to be direct, but may occur through linker sequences.

[0177] In certain preferred embodiments, proteins of the invention are fusion proteins comprising an amino acid sequence that is an N and/or C-terminal deletion of a polypeptide of the invention. In preferred embodiments, the invention is directed to a fusion protein comprising an amino acid sequence that is at least 90%, 95%, 96%, 97%, 98% or 99% identical to a polypeptide sequence of the invention. Polynucleotides encoding these proteins are also encompassed by the invention.

[0178] Moreover, fusion proteins may also be engineered to improve characteristics of the polypeptide of the present invention. For instance, a region of additional amino acids, particularly charged amino acids, may be added to the N-terminus of the polypeptide to improve stability and persistence during purification from the host cell or subsequent handling and storage. Also, peptide moieties may be added to the polypeptide to facilitate purification. Such regions may be removed prior to final preparation of the polypeptide. The addition of peptide moieties to facilitate handling of polypeptides are familiar and routine techniques in the art.

[0179] As one of skill in the art will appreciate that, as discussed above, polypeptides of the present invention, and epitope-bearing fragments thereof, can be combined with heterologous polypeptide sequences. For example, the polypeptides of the present invention may be fused with heterologous polypeptide sequences, for example, the polypeptides of the present invention may be fused with the constant domain of immunoglobulins (IgA, IgE, IgG, IgM) or portions thereof (CH1, CH2, CH3, and any combination thereof, including both entire domains and portions thereof), or albumin (including, but not limited to, native or recombinant human albumin or fragments or variants thereof (see, e.g., U.S. Pat. No. 5,876,969, issued Mar. 2, 1999, EP Patent 0 413 622, and U.S. Pat. No. 5,766,883, issued June 16, 1998, herein incorporated by reference in their entirety)), resulting in chimeric polypeptides. For example, EP-A-O 464 533 (Canadian counterpart 2045869) discloses fusion proteins comprising various portions of constant region of immunoglobulin molecules together with another human protein or part thereof. In many cases, the Fc part in a fusion protein is beneficial in therapy and diagnosis, and thus can result in, for example, improved pharmacokinetic properties (EP-A 0232 262). Alternatively, deleting the Fc part after the fusion protein has been expressed, detected, and purified, would be desired. For example, the Fc portion may hinder therapy and diagnosis if the fusion protein is used as an antigen for immunizations. In drug discovery, for example, human proteins, such as hIL-5, have been fused with Fc portions for the purpose of high-throughput screening assays to identify antagonists of hIL-5. See, D. Bennett et al., J. Molecular Recognition 8:52-58 (1995); K. Johanson et al., J. Biol. Chem. 270:9459-9471 (1995).

[0180] Moreover, the polypeptides of the present invention can be fused to marker sequences, such as a polypeptide which facilitates purification of the fused polypeptide. In preferred embodiments, the marker amino acid sequence is a hexa-histidine peptide, such as the tag provided in a pQE vector (QIAGEN, Inc., 9259 Eton Avenue, Chatsworth, Calif., 91311), among others, many of which are commercially available. As described in Gentz et al., Proc. Natl. Acad. Sci. USA 86:821-824 (1989), for instance, hexa-histidine provides for convenient purification of the fusion protein. Another peptide tag useful for purification, the “HA” tag, corresponds to an epitope derived from the influenza hemagglutinin protein (Wilson et al., Cell 37:767 (1984)).

[0181] Additional fusion proteins of the invention may be generated through the techniques of gene-shuffling, motif-shuffling, exon-shuffling, and/or codon-shuffling (collectively referred to as “DNA shuffling”). DNA shuffling may be employed to modulate the activities of polypeptides of the invention, such methods can be used to generate polypeptides with altered activity, as well as agonists and antagonists of the polypeptides. See, generally, U.S. Pat. Nos. 5,605,793; 5,811,238; 5,830,721; 5,834,252; and 5,837,458, and Patten et al., Curr. Opinion Biotechnol. 8:724-33 (1997); Harayama, Trends Biotechnol. 16(2): 76-82 (1998); Hansson, et al., J. Mol. Biol. 287:265-76 (1999); and Lorenzo and Blasco, Biotechniques 24(2): 308-13 (1998) (each of these patents and publications are hereby incorporated by reference in its entirety). In one embodiment, alteration of polynucleotides corresponding to SEQ ID NO:X and the polypeptides encoded by these polynucleotides may be achieved by DNA shuffling. DNA shuffling involves the assembly of two or more DNA segments by homologous or site-specific recombination to generate variation in the polynucleotide sequence. In another embodiment, polynucleotides of the invention, or the encoded polypeptides, may be altered by being subjected to random mutagenesis by error-prone PCR, random nucleotide insertion or other methods prior to recombination. In another embodiment, one or more components, motifs, sections, parts, domains, fragments, etc., of a polynucleotide encoding a polypeptide of the invention may be recombined with one or more components, motifs, sections, parts, domains, fragments, etc. of one or more heterologous molecules.

[0182] Thus, any of these above fusions can be engineered using the polynucleotides or the polypeptides of the present invention.

[0183] Recombinant and Synthetic Production of Polypeptides of the Invention

[0184] The present invention also relates to vectors containing the polynucleotide of the present invention, host cells, and the production of polypeptides by synthetic and recombinant techniques. The vector may be, for example, a phage, plasmid, viral, or retroviral vector. Retroviral vectors may be replication competent or replication defective. In the latter case, viral propagation generally will occur only in complementing host cells.

[0185] The polynucleotides of the invention may be joined to a vector containing a selectable marker for propagation in a host. Generally, a plasmid vector is introduced in a precipitate, such as a calcium phosphate precipitate, or in a complex with a charged lipid. If the vector is a virus, it may be packaged in vitro using an appropriate packaging cell line and then transduced into host cells.

[0186] The polynucleotide insert should be operatively linked to an appropriate promoter, such as the phage lambda PL promoter, the E. coli lac, trp, phoA and tac promoters, the SV40 early and late promoters and promoters of retroviral LTRs, to name a few. Other suitable promoters will be known to the skilled artisan. The expression constructs will further contain sites for transcription initiation, termination, and, in the transcribed region, a ribosome binding site for translation. The coding portion of the transcripts expressed by the constructs will preferably include a translation initiating codon at the beginning and a termination codon (UAA, UGA or UAG) appropriately positioned at the end of the polypeptide to be translated.

[0187] As indicated, the expression vectors will preferably include at least one selectable marker. Such markers include dihydrofolate reductase, G418, glutamine synthase, or neomycin resistance for eukaryotic cell culture, and tetracycline, kanamycin or ampicillin resistance genes for culturing in E. coli and other bacteria. Representative examples of appropriate hosts include, but are not limited to, bacterial cells, such as E. coli, Streptomyces and Salmonella typhimurium cells; fungal cells, such as yeast cells (e.g., Saccharomyces cerevisiae or Pichia pastoris (ATCC Accession No. 201178)); insect cells such as Drosophila S2 and Spodoptera Sf9 cells; animal cells such as CHO, COS, 293, and Bowes melanoma cells; and plant cells. Appropriate culture mediums and conditions for the above-described host cells are known in the art.

[0188] Among vectors preferred for use in bacteria include pQE70, pQE60 and pQE-9, available from QIAGEN, Inc.; pBluescript vectors, Phagescript vectors, pNH8A, pNH16a, pNH18A, pNH46A, available from Stratagene Cloning Systems, Inc.; and ptrc99a, pKK223-3, pKK233-3, pDR540, pRIT5 available from Pharmacia Biotech, Inc. Among preferred eukaryotic vectors are pWLNEO, pSV2CAT, pOG44, pXT1 and pSG available from Stratagene; and pSVK3, pBPV, pMSG and pSVL available from Pharmacia. Preferred expression vectors for use in yeast systems include, but are not limited to pYES2, pYD1, pTEF1/Zeo, pYES2/GS, pPICZ, pGAPZ, pGAPZalph, pPIC9, pPIC3.5, pHIL-D2, pHIL-S1, pPIC3.5K, pPIC9K, and PAO815 (all available from Invitrogen, Carlbad, Calif.). Other suitable vectors will be readily apparent to the skilled artisan.

[0189] Vectors which use glutamine synthase (GS) or DHFR as the selectable markers can be amplified in the presence of the drugs methionine sulphoximine or methotrexate, respectively. An advantage of glutamine synthase based vectors are the availabilty of cell lines (e.g., the murine myeloma cell line, NSO) which are glutamine synthase negative. Glutamine synthase expression systems can also function in glutamine synthase expressing cells (e.g., Chinese Hamster Ovary (CHO) cells) by providing additional inhibitor to prevent the functioning of the endogenous gene. A glutamine synthase expression system and components thereof are detailed in PCT publications: WO87/04462; WO86/05807; WO89/01036; WO89/10404; and WO91/06657, which are hereby incorporated in their entireties by reference herein. Additionally, glutamine synthase expression vectors can be obtained from Lonza Biologics, Inc. (Portsmouth, N.H.). Expression and production of monoclonal antibodies using a GS expression system in murine myeloma cells is described in Bebbington et al., Bio/technology 10:169(1992) and in Biblia and Robinson Biotechnol. Prog. 11:1 (1995) which are herein incorporated by reference.

[0190] The present invention also relates to host cells containing the above-described vector constructs described herein, and additionally encompasses host cells containing nucleotide sequences of the invention that are operably associated with one or more heterologous control regions (e.g., promoter and/or enhancer) using techniques known of in the art. The host cell can be a higher eukaryotic cell, such as a mammalian cell (e.g., a human derived cell), or a lower eukaryotic cell, such as a yeast cell, or the host cell can be a prokaryotic cell, such as a bacterial cell. A host strain may be chosen which modulates the expression of the inserted gene sequences, or modifies and processes the gene product in the specific fashion desired. Expression from certain promoters can be elevated in the presence of certain inducers; thus expression of the genetically engineered polypeptide may be controlled. Furthermore, different host cells have characteristics and specific mechanisms for the translational and post-translational processing and modification (e.g., phosphorylation, cleavage) of proteins. Appropriate cell lines can be chosen to ensure the desired modifications and processing of the foreign protein expressed.

[0191] Introduction of the nucleic acids and nucleic acid constructs of the invention into the host cell can be effected by calcium phosphate transfection, DEAE-dextran mediated transfection, cationic lipid-mediated transfection, electroporation, transduction, infection, or other methods. Such methods are described in many standard laboratory manuals, such as Davis et al., Basic Methods In Molecular Biology (1986). It is specifically contemplated that the polypeptides of the present invention may in fact be expressed by a host cell lacking a recombinant vector.

[0192] In addition to encompassing host cells containing the vector constructs discussed herein, the invention also encompasses primary, secondary, and immortalized host cells of vertebrate origin, particularly mammalian origin that have been engineered to delete or replace endogenous genetic material (e.g., the coding sequence), and/or to include genetic material (e.g., heterologous polynucleotide sequences) that is operably associated with polynucleotides of the invention, and which activates, alters, and/or amplifies endogenous polynucleotides. For example, techniques known in the art may be used to operably associate heterologous control regions (e.g., promoter and/or enhancer) and endogenous polynucleotide sequences via homologous recombination (see, e.g., U.S. Pat. No. 5,641,670, issued Jun. 24, 1997; International Publication Number WO 96/29411; International Publication Number WO 94/12650; Koller et al., Proc. Natl. Acad. Sci. USA 86:8932-8935 (1989); and Zijlstra et al., Nature 342:435-438 (1989), the disclosures of each of which are incorporated by reference in their entireties).

[0193] Polypeptides of the invention can be recovered and purified from recombinant cell cultures by well-known methods including ammonium sulfate or ethanol precipitation, acid extraction, anion or cation exchange chromatography, phosphocellulose chromatography, hydrophobic interaction chromatography, affinity chromatography, hydroxylapatite chromatography and lectin chromatography. Most preferably, high performance liquid chromatography (“HPLC”) is employed for purification.

[0194] Polypeptides of the present invention can also be recovered from: products purified from natural sources, including bodily fluids, tissues and cells, whether directly isolated or cultured; products of chemical synthetic procedures; and products produced by recombinant techniques from a prokaryotic or eukaryotic host, including, for example, bacterial, yeast, higher plant, insect, and mammalian cells. Depending upon the host employed in a recombinant production procedure, the polypeptides of the present invention may be glycosylated or may be non-glycosylated. In addition, polypeptides of the invention may also include an initial modified methionine residue, in some cases as a result of host-mediated processes. Thus, it is well known in the art that the N-terminal methionine encoded by the translation initiation codon generally is removed with high efficiency from any protein after translation in all eukaryotic cells. While the N-terminal methionine on most proteins also is efficiently removed in most prokaryotes, for some proteins, this prokaryotic removal process is inefficient, depending on the nature of the amino acid to which the N-terminal methionine is covalently linked.

[0195] In one embodiment, the yeast Pichia pastoris is used to express polypeptides of the invention in a eukaryotic system. Pichia pastoris is a methylotrophic yeast which can metabolize methanol as its sole carbon source. A main step in the methanol metabolization pathway is the oxidation of methanol to formaldehyde using 02. This reaction is catalyzed by the enzyme alcohol oxidase. In order to metabolize methanol as its sole carbon source, Pichia pastoris must generate high levels of alcohol oxidase due, in part, to the relatively low affinity of alcohol oxidase for O₂. Consequently, in a growth medium depending on methanol as a main carbon source, the promoter region of one of the two alcohol oxidase genes (AOX1) is highly active. In the presence of methanol, alcohol oxidase produced from the AOX1 gene comprises up to approximately 30% of the total soluble protein in Pichia pastoris. See Ellis, S. B., et al., Mol. Cell. Biol. 5:1111-21 (1985); Koutz, P. J., et al., Yeast 5:167-77 (1989); Tschopp, J. F., et al., Nucl. Acids Res. 15:3859-76 (1987). Thus, a heterologous coding sequence, such as, for example, a polynucleotide of the present invention, under the transcriptional regulation of all or part of the AOX1 regulatory sequence is expressed at exceptionally high levels in Pichia yeast grown in the presence of methanol.

[0196] In one example, the plasmid vector pPIC9K is used to express DNA encoding a polypeptide of the invention, as set forth herein, in a Pichea yeast system essentially as described in “Pichia Protocols: Methods in Molecular Biology,” D. R. Higgins and J. Cregg, eds. The Humana Press, Totowa, N.J., 1998. This expression vector allows expression and secretion of a polypeptide of the invention by virtue of the strong AOXI promoter linked to the Pichia pastoris alkaline phosphatase (PHO) secretory signal peptide (i.e., leader) located upstream of a multiple cloning site.

[0197] Many other yeast vectors could be used in place of pPIC9K, such as, pYES2, pYD1, pTEF1/Zeo, pYES2/GS, pPICZ, pGAPZ, pGAPZalpha, pPIC9, pPIC3.5, pHIL-D2, pHIL-S1, pPIC3.5K, and PAO815, as one skilled in the art would readily appreciate, as long as the proposed expression construct provides appropriately located signals for transcription, translation, secretion (if desired), and the like, including an in-frame AUG as required.

[0198] In another embodiment, high-level expression of a heterologous coding sequence, such as, for example, a polynucleotide of the present invention, may be achieved by cloning the heterologous polynucleotide of the invention into an expression vector such as, for example, pGAPZ or pGAPZalpha, and growing the yeast culture in the absence of methanol.

[0199] In addition to encompassing host cells containing the vector constructs discussed herein, the invention also encompasses primary, secondary, and immortalized host cells of vertebrate origin, particularly mammalian origin, that have been engineered to delete or replace endogenous genetic material (e.g., coding sequence), and/or to include genetic material (e.g., heterologous polynucleotide sequences) that is operably associated with polynucleotides of the invention, and which activates, alters, and/or amplifies endogenous polynucleotides. For example, techniques known in the art may be used to operably associate heterologous control regions (e.g., promoter and/or enhancer) and endogenous polynucleotide sequences via homologous recombination (see, e.g., U.S. Pat. No. 5,641,670, issued Jun. 24, 1997; International Publication No. WO 96/29411, published Sep. 26, 1996; International Publication No. WO 94/12650, published Aug. 4, 1994; Koller et al., Proc. Natl. Acad. Sci. USA 86:8932-8935 (1989); and Zijlstra et al., Nature 342:435-438 (1989), the disclosures of each of which are incorporated by reference in their entireties).

[0200] In addition, polypeptides of the invention can be chemically synthesized using techniques known in the art (e.g., see Creighton, 1983, Proteins: Structures and Molecular Principles, W.H. Freeman & Co., N.Y., and Hunkapiller et al., Nature, 310:105-111 (1984)). For example, a polypeptide corresponding to a fragment of a polypeptide can be synthesized by use of a peptide synthesizer. Furthermore, if desired, nonclassical amino acids or chemical amino acid analogs can be introduced as a substitution or addition into the polypeptide sequence. Non-classical amino acids include, but are not limited to, to the D-isomers of the common amino acids, 2,4-diaminobutyric acid, a-amino isobutyric acid, 4-aminobutyric acid, Abu, 2-amino butyric acid, g-Abu, e-Ahx, 6-amino hexanoic acid, Aib, 2-amino isobutyric acid, 3-amino propionic acid, ornithine, norleucine, norvaline, hydroxyproline, sarcosine, citrulline, homocitrulline, cysteic acid, t-butylglycine, t-butylalanine, phenylglycine, cyclohexylalanine, b-alanine, fluoro-amino acids, designer amino acids such as b-methyl amino acids, Ca-methyl amino acids, Na-methyl amino acids, and amino acid analogs in general. Furthermore, the amino acid can be D (dextrorotary) or L (levorotary).

[0201] The invention encompasses polypeptides of the present invention which are differentially modified during or after translation, e.g., by glycosylation, acetylation, phosphorylation, amidation, derivatization by known protecting/blocking groups, proteolytic cleavage, linkage to an antibody molecule or other cellular ligand, etc. Any of numerous chemical modifications may be carried out by known techniques, including but not limited, to specific chemical cleavage by cyanogen bromide, trypsin, chymotrypsin, papain, V8 protease, NaBH₄; acetylation, formylation, oxidation, reduction; metabolic synthesis in the presence of tunicamycin; etc.

[0202] Additional post-translational modifications encompassed by the invention include, for example, e.g., N-linked or O-linked carbohydrate chains, processing of N-terminal or C-terminal ends), attachment of chemical moieties to the amino acid backbone, chemical modifications of N-linked or O-linked carbohydrate chains, and addition or deletion of an N-terminal methionine residue as a result of procaryotic host cell expression. The polypeptides may also be modified with a detectable label, such as an enzymatic, fluorescent, isotopic or affinity label to allow for detection and isolation of the protein.

[0203] Examples of suitable enzymes include horseradish peroxidase, alkaline phosphatase, beta-galactosidase, or acetylcholinesterase; examples of suitable prosthetic group complexes include streptavidin/biotin and avidin/biotin; examples of suitable fluorescent materials include umbelliferone, fluorescein, fluorescein isothiocyanate, rhodamine, dichlorotriazinylamine fluorescein, dansyl chloride or phycoerythrin; an example of a luminescent material includes luminol; examples of bioluminescent materials include luciferase, luciferin, and aequorin; and examples of suitable radioactive material include iodine (¹²¹I, ¹²³I, ¹²⁵I, ¹³¹I), carbon (¹⁴C), sulfur (³⁵S), tritium (³H), indium (¹¹¹In, ¹¹²In, ^{113m}In, ^{115m}In), technetium (⁹⁹Tc, ^{99m}Tc), thallium (²⁰¹Ti), gallium (⁶⁸Ga, ⁶⁷Ga), palladium (¹⁰³Pd), molybdenum (⁹⁹Mo), xenon (¹³³Xe), fluorine (¹⁸F), ¹⁵³Sm, ¹⁷⁷Lu, ¹⁵⁹Gd, ¹⁴⁹Pm, ¹⁴⁰La, ¹⁷⁵Yb, ¹⁶⁶Ho, ⁹⁰Y, ⁴⁷Sc, ¹⁸⁶Re, ¹⁸⁸Re, ¹⁴²Pr, ¹⁰⁵Rh, and ⁹⁷Ru.

[0204] In specific embodiments, a polypeptide of the present invention or fragment or variant thereof is attached to macrocyclic chelators that associate with radiometal ions, including but not limited to, ¹⁷⁷Lu, ⁹⁰Y, ¹⁶⁶Ho, and ¹⁵³Sm, to polypeptides. In a preferred embodiment, the radiometal ion associated with the macrocyclic chelators is ¹¹¹In. In another preferred embodiment, the radiometal ion associated with the macrocyclic chelator is ⁹⁰Y. In specific embodiments, the macrocyclic chelator is 1,4,7,10-tetraazacyclododecane-N,N′,N″,N′″-tetraacetic acid (DOTA). In other specific embodiments, DOTA is attached to an antibody of the invention or fragment thereof via a linker molecule. Examples of linker molecules useful for conjugating DOTA to a polypeptide are commonly known in the art—see, for example, DeNardo et al., Clin Cancer Res. 4(10): 2483-90 (1998); Peterson et al., Bioconjug. Chem. 10(4): 553-7 (1999); and Zimmerman et al, Nucl. Med. Biol. 26(8): 943-50 (1999); which are hereby incorporated by reference in their entirety.

[0205] As mentioned, the proteins of the invention may be modified by either natural processes, such as posttranslational processing, or by chemical modification techniques which are well known in the art. It will be appreciated that the same type of modification may be present in the same or varying degrees at several sites in a given polypeptide. Polypeptides of the invention may be branched, for example, as a result of ubiquitination, and they may be cyclic, with or without branching. Cyclic, branched, and branched cyclic polypeptides may result from posttranslation natural processes or may be made by synthetic methods. Modifications include acetylation, acylation, ADP-ribosylation, amidation, covalent attachment of flavin, covalent attachment of a heme moiety, covalent attachment of a nucleotide or nucleotide derivative, covalent attachment of a lipid or lipid derivative, covalent attachment of phosphotidylinositol, cross-linking, cyclization, disulfide bond formation, demethylation, formation of covalent cross-links, formation of cysteine, formation of pyroglutamate, formylation, gamma-carboxylation, glycosylation, GPI anchor formation, hydroxylation, iodination, methylation, myristoylation, oxidation, pegylation, proteolytic processing, phosphorylation, prenylation, racemization, selenoylation, sulfation, transfer-RNA mediated addition of amino acids to proteins such as arginylation, and ubiquitination. (See, for instance, PROTEINS—STRUCTURE AND MOLECULAR PROPERTIES, 2nd Ed., T. E. Creighton, W. H. Freeman and Company, New York (1993); POSTTRANSLATIONAL COVALENT MODIFICATION OF PROTEINS, B. C. Johnson, Ed., Academic Press, New York, pgs. 1-12 (1983); Seifter et al., Meth. Enzymol. 182:626-646 (1990); Rattan et al., Ann. N.Y. Acad. Sci. 663:48-62 (1992)).

[0206] Also provided by the invention are chemically modified derivatives of the polypeptides of the invention which may provide additional advantages such as increased solubility, stability and circulating time of the polypeptide, or decreased immunogenicity (see U.S. Pat. No. 4,179,337). The chemical moieties for derivitization may be selected from water soluble polymers such as polyethylene glycol, ethylene glycol/propylene glycol copolymers, carboxymethylcellulose, dextran, polyvinyl alcohol and the like. The polypeptides may be modified at random positions within the molecule, or at predetermined positions within the molecule and may include one, two, three or more attached chemical moieties.

[0207] The polymer may be of any molecular weight, and may be branched or unbranched. For polyethylene glycol, the preferred molecular weight is between about 1 kDa and about 100 kDa (the term “about” indicating that in preparations of polyethylene glycol, some molecules will weigh more, some less, than the stated molecular weight) for ease in handling and manufacturing. Other sizes may be used, depending on the desired therapeutic profile (e.g., the duration of sustained release desired, the effects, if any on biological activity, the ease in handling, the degree or lack of antigenicity and other known effects of the polyethylene glycol to a therapeutic protein or analog). For example, the polyethylene glycol may have an average molecular weight of about 200, 500, 1000, 1500, 2000, 2500, 3000, 3500, 4000, 4500, 5000, 5500, 6000, 6500, 7000, 7500, 8000, 8500, 9000, 9500, 10,000, 10,500, 11,000, 11,500, 12,000, 12,500, 13,000, 13,500, 14,000, 14,500, 15,000, 15,500, 16,000, 16,500, 17,000, 17,500, 18,000, 18,500, 19,000, 19,500, 20,000, 25,000, 30,000, 35,000, 40,000, 45,000, 50,000, 55,000, 60,000, 65,000, 70,000, 75,000, 80,000, 85,000, 90,000, 95,000, or 100,000 kDa.

[0208] As noted above, the polyethylene glycol may have a branched structure. Branched polyethylene glycols are described, for example, in U.S. Pat. No. 5,643,575; Morpurgo et al., Appl. Biochem. Biotechnol. 56:59-72 (1996); Vorobjev et al., Nucleosides Nucleotides 18:2745-2750 (1999); and Caliceti et al., Bioconjug. Chem. 10:638-646 (1999), the disclosures of each of which are incorporated herein by reference.

[0209] The polyethylene glycol molecules (or other chemical -moieties) should be attached to the protein with consideration of effects on functional or antigenic domains of the protein. There are a number of attachment methods available to those skilled in the art, such as, for example, the method disclosed in EP 0 401 384 (coupling PEG to G-CSF), herein incorporated by reference; see also Malik et al., Exp. Hematol. 20:1028-1035 (1992), reporting pegylation of GM-CSF using tresyl chloride. For example, polyethylene glycol may be covalently bound through amino acid residues via a reactive group, such as a free amino or carboxyl group. Reactive groups are those to which an activated polyethylene glycol molecule may be bound. The amino acid residues having a free amino group may include lysine residues and the N-terminal amino acid residues; those having a free carboxyl group may include aspartic acid residues glutamic acid residues and the C-terminal amino acid residue. Sulfhydryl groups may also be used as a reactive group for attaching the polyethylene glycol molecules. Preferred for therapeutic purposes is attachment at an amino group, such as attachment at the N-terminus or lysine group.

[0210] As suggested above, polyethylene glycol may be attached to proteins via linkage to any of a number of amino acid residues. For example, polyethylene glycol can be linked to proteins via covalent bonds to lysine, histidine, aspartic acid, glutamic acid, or cysteine residues. One or more reaction chemistries may be employed to attach polyethylene glycol to specific amino acid residues (e.g., lysine, histidine, aspartic acid, glutamic acid, or cysteine) of the protein or to more than one type of amino acid residue (e.g., lysine, histidine, aspartic acid, glutamic acid, cysteine and combinations thereof) of the protein.

[0211] One may specifically desire proteins chemically modified at the N-terminus. Using polyethylene glycol as an illustration of the present composition, one may select from a variety of polyethylene glycol molecules (by molecular weight, branching, etc.), the proportion of polyethylene glycol molecules to protein (polypeptide) molecules in the reaction mix, the type of pegylation reaction to be performed, and the method of obtaining the selected N-terminally pegylated protein. The method of obtaining the N-terminally pegylated preparation (i.e., separating this moiety from other monopegylated moieties if necessary) may be by purification of the N-terminally pegylated material from a population of pegylated protein molecules. Selective proteins chemically modified at the N-terminus modification may be accomplished by reductive alkylation which exploits differential reactivity of different types of primary amino groups (lysine versus the N-terminal) available for derivatization in a particular protein. Under the appropriate reaction conditions, substantially selective derivatization of the protein at the N-terminus with a carbonyl group containing polymer is achieved.

[0212] As indicated above, pegylation of the proteins of the invention may be accomplished by any number of means. For example, polyethylene glycol may be attached to the protein either directly or by an intervening linker. Linkerless systems for attaching polyethylene glycol to proteins are described in Delgado et al., Crit. Rev. Thera. Drug Carrier Sys. 9:249-304 (1992); Francis et al., Intern. J. of Hematol. 68:1-18 (1998); U.S. Pat. No. 4,002,531; U.S. Pat. No. 5,349,052; WO 95/06058; and WO 98/32466, the disclosures of each of which are incorporated herein by reference.

[0213] One system for attaching polyethylene glycol directly to amino acid residues of proteins without an intervening linker employs tresylated MPEG, which is produced by the modification of monmethoxy polyethylene glycol (MPEG) using tresylchloride (CISO₂CH₂CF₃). Upon reaction of protein with tresylated MPEG, polyethylene glycol is directly attached to amine groups of the protein. Thus, the invention includes protein-polyethylene glycol conjugates produced by reacting proteins of the invention with a polyethylene glycol molecule having a 2,2,2-trifluoreothane sulphonyl group.

[0214] Polyethylene glycol can also be attached to proteins using a number of different intervening linkers. For example, U.S. Pat. No. 5,612,460, the entire disclosure of which is incorporated herein by reference, discloses urethane linkers for connecting polyethylene glycol to proteins. Protein-polyethylene glycol conjugates wherein the polyethylene glycol is attached to the protein by a linker can also be produced by reaction of proteins with compounds such as MPEG-succinimidylsuccinate, MPEG activated with 1,1′-carbonyldiimidazole, MPEG-2,4,5-trichloropenylcarbonate, MPEG-p-nitrophenolcarbonate, and various MPEG-succinate derivatives. A number of additional polyethylene glycol derivatives and reaction chemistries for attaching polyethylene glycol to proteins are described in International Publication No. WO 98/32466, the entire disclosure of which is incorporated herein by reference. Pegylated protein products produced using the reaction chemistries set out herein are included within the scope of the invention.

[0215] The number of polyethylene glycol moieties attached to each protein of the invention (i.e., the degree of substitution) may also vary. For example, the pegylated proteins of the invention may be linked, on average, to 1, 2, 3, 4, 5, 6, 7, 8, 9, 10, 12, 15, 17, 20, or more polyethylene glycol molecules. Similarly, the average degree of substitution within ranges such as 1-3, 2-4, 3-5, 4-6, 5-7, 6-8, 7-9, 8-10, 9-11, 10-12, 11-13, 12-14, 13-15, 14-16, 15-17, 16-18, 17-19, or 18-20 polyethylene glycol moieties per protein molecule. Methods for determining the degree of substitution are discussed, for example, in Delgado et al., Crit. Rev. Thera. Drug Carrier Sys. 9:249-304 (1992).

[0216] The polypeptides of the invention can be recovered and purified from chemical synthesis and recombinant cell cultures by standard methods which include, but are not limited to, ammonium sulfate or ethanol precipitation, acid extraction, anion or cation exchange chromatography, phosphocellulose chromatography, hydrophobic interaction chromatography, affinity chromatography, hydroxylapatite chromatography and lectin chromatography. Most preferably, high performance liquid chromatography (“HPLC”) is employed for purification. Well known techniques for refolding protein may be employed to regenerate active conformation when the polypeptide is denatured during isolation and/or purification.

[0217] The polypeptides of the invention may be in monomers or multimers (i.e., dimers, trimers, tetramers and higher multimers). Accordingly, the present invention relates to monomers and multimers of the polypeptides of the invention, their preparation, and compositions (preferably, Therapeutics) containing them. In specific embodiments, the polypeptides of the invention are monomers, dimers, trimers or tetramers. In additional embodiments, the multimers of the invention are at least dimers, at least trimers, or at least tetramers.

[0218] Multimers encompassed by the invention may be homomers or heteromers. As used herein, the term homomer refers to a multimer containing only polypeptides corresponding to a protein of the invention (e.g., the amino acid sequence of SEQ ID NO:Y, an amino acid sequence encoded by SEQ ID NO:X or the complement of SEQ ID NO:X, the amino acid sequence encoded by the portion of SEQ ID NO:X as defined in columns 8 and 9 of Table 2, and/or an amino acid sequence encoded by cDNA contained in Clone ID NO:Z (including fragments, variants, splice variants, and fusion proteins, corresponding to these as described herein)). These homomers may contain polypeptides having identical or different amino acid sequences. In a specific embodiment, a homomer of the invention is a multimer containing only polypeptides having an identical amino acid sequence. In another specific embodiment, a homomer of the invention is a multimer containing polypeptides having different amino acid sequences. In specific embodiments, the multimer of the invention is a homodimer (e.g., containing two polypeptides having identical or different amino acid sequences) or a homotrimer (e.g., containing three polypeptides having identical and/or different amino acid sequences). In additional embodiments, the homomeric multimer of the invention is at least a homodimer, at least a homotrimer, or at least a homotetramer.

[0219] As used herein, the term heteromer refers to a multimer containing one or more heterologous polypeptides (i.e., polypeptides of different proteins) in addition to the polypeptides of the invention. In a specific embodiment, the multimer of the invention is a heterodimer, a heterotrimer, or a heterotetramer. In additional embodiments, the heteromeric multimer of the invention is at least a heterodimer, at least a heterotrimer, or at least a heterotetramer.

[0220] Multimers of the invention may be the result of hydrophobic, hydrophilic, ionic and/or covalent associations and/or may be indirectly linked by, for example, liposome formation. Thus, in one embodiment, multimers of the invention, such as, for example, homodimers or homotrimers, are formed when polypeptides of the invention contact one another in solution. In another embodiment, heteromultimers of the invention, such as, for example, heterotrimers or heterotetramers, are formed when polypeptides of the invention contact antibodies to the polypeptides of the invention (including antibodies to the heterologous polypeptide sequence in a fusion protein of the invention) in solution. In other embodiments, multimers of the invention are formed by covalent associations with and/or between the polypeptides of the invention. Such covalent associations may involve one or more amino acid residues contained in the polypeptide sequence (e.g., that recited in SEQ ID NO:Y, encoded by the portion of SEQ ID NO:X as defined in columns 8 and 9 of Table 2, and/or encoded by the cDNA contained in Clone ID NO:Z). In one instance, the covalent associations are cross-linking between cysteine residues located within the polypeptide sequences which interact in the native (i.e., naturally occurring) polypeptide. In another instance, the covalent associations are the consequence of chemical or recombinant manipulation. Alternatively, such covalent associations may involve one or more amino acid residues contained in the heterologous polypeptide sequence in a fusion protein. In one example, covalent associations are between the heterologous sequence contained in a fusion protein of the invention (see, e.g., U.S. Pat. No. 5,478,925). In a specific example, the covalent associations are between the heterologous sequence contained in a Fc fusion protein of the invention (as described herein). In another specific example, covalent associations of fusion proteins of the invention are between heterologous polypeptide sequence from another protein that is capable of forming covalently associated multimers, such as for example, osteoprotegerin (see, e.g., International Publication NO: WO 98/49305, the contents of which are herein incorporated by reference in its entirety). In another embodiment, two or more polypeptides of the invention are joined through peptide linkers. Examples include those peptide linkers described in U.S. Pat. No. 5,073,627 (hereby incorporated by reference). Proteins comprising multiple polypeptides of the invention separated by peptide linkers may be produced using conventional recombinant DNA technology.

[0221] Another method for preparing multimer polypeptides of the invention involves use of polypeptides of the invention fused to a leucine zipper or isoleucine zipper polypeptide sequence. Leucine zipper and isoleucine zipper domains are polypeptides that promote multimerization of the proteins in which they are found. Leucine zippers were originally identified in several DNA-binding proteins (Landschulz et al., Science 240:1759, (1988)), and have since been found in a variety of different proteins. Among the known leucine zippers are naturally occurring peptides and derivatives thereof that dimerize or trimerize. Examples of leucine zipper domains suitable for producing soluble multimeric proteins of the invention are those described in PCT application WO 94/10308, hereby incorporated by reference. Recombinant fusion proteins comprising a polypeptide of the invention fused to a polypeptide sequence that dimerizes or trimerizes in solution. are expressed in suitable host cells, and the resulting soluble multimeric fusion protein is recovered from the culture supernatant using techniques known in the art.

[0222] Trimeric polypeptides of the invention may offer the advantage of enhanced biological activity. Preferred leucine zipper moieties and isoleucine moieties are those that preferentially form trimers. One example is a leucine zipper derived from lung surfactant protein D (SPD), as described in Hoppe et al. (FEBS Letters 344:191, (1994)) and in U.S. patent application Ser. No. 08/446,922, hereby incorporated by reference. Other peptides derived from naturally occurring trimeric proteins may be employed in preparing trimeric polypeptides of the invention.

[0223] In another example, proteins of the invention are associated by interactions between Flag® polypeptide sequence contained in fusion proteins of the invention containing Flag® polypeptide sequence. In a further embodiment, proteins of the invention are associated by interactions between heterologous polypeptide sequence contained in Flag® fusion proteins of the invention and anti-Flag® antibody.

[0224] The multimers of the invention may be generated using chemical techniques known in the art. For example, polypeptides desired to be contained in the multimers of the invention may be chemically cross-linked using linker molecules and linker molecule length optimization techniques known in the art (see, e.g., U.S. Pat. No. 5,478,925, which is herein incorporated by reference in its entirety). Additionally, multimers of the invention may be generated using techniques known in the art to form one or more inter-molecule cross-links between the cysteine residues located within the sequence of the polypeptides desired to be contained in the multimer (see, e.g., U.S. Pat. No. 5,478,925, which is herein incorporated by reference in its entirety). Further, polypeptides of the invention may be routinely modified by the addition of cysteine or biotin to the C-terminus or N-terminus of the polypeptide and techniques known in the art may be applied to generate multimers containing one or more of these modified polypeptides (see, e.g., U.S. Pat. No. 5,478,925, which is herein incorporated by reference in its entirety). Additionally, techniques known in the art may be applied to generate liposomes containing the polypeptide components desired to be contained in the multimer of the invention (see, e.g., U.S. Pat. No. 5,478,925, which is herein incorporated by reference in its entirety).

[0225] Alternatively, multimers of the invention may be generated using genetic engineering techniques known in the art. In one embodiment, polypeptides contained in multimers of the invention are produced recombinantly using fusion protein technology described herein or otherwise known in the art (see, e.g., U.S. Pat. No. 5,478,925, which is herein incorporated by reference in its entirety). In a specific embodiment, polynucleotides coding for a homodimer of the invention are generated by ligating a polynucleotide sequence encoding a polypeptide of the invention to a sequence encoding a linker polypeptide and then further to a synthetic polynucleotide encoding the translated product of the polypeptide in the reverse orientation from the original C-terminus to the N-terminus (lacking the leader sequence) (see, e.g., U.S. Pat. No. 5,478,925, which is herein incorporated by reference in its entirety). In another embodiment, recombinant techniques described herein or otherwise known in the art are applied to generate recombinant polypeptides of the invention which contain a transmembrane domain (or hydrophobic or signal peptide) and which can be incorporated by membrane reconstitution techniques into liposomes (see, e.g., U.S. Pat. No. 5,478,925, which is herein incorporated by reference in its entirety).

[0226] Antibodies

[0227] Further polypeptides of the invention relate to antibodies and T-cell antigen receptors (TCR) which immunospecifically bind a polypeptide, polypeptide fragment, or variant of the invention (e.g., a polypeptide or fragment or variant of the amino acid sequence of SEQ ID NO:Y or a polypeptide encoded by the cDNA contained in Clone ID No:Z, and/or an epitope, of the present invention) as determined by immunoassays well known in the art for assaying specific antibody-antigen binding. Antibodies of the invention include, but are not limited to, polyclonal, monoclonal, multispecific, human, humanized or chimeric antibodies, single chain antibodies, Fab fragments, F(ab′) fragments, fragments produced by a Fab expression library, anti-idiotypic (anti-Id) antibodies (including, e.g., anti-Id antibodies to antibodies of the invention), intracellularly-made antibodies (i.e., intrabodies), and epitope-binding fragments of any of the above. The term “antibody,” as used herein, refers to immunoglobulin molecules and immunologically active portions of immunoglobulin molecules, i.e., molecules that contain an antigen binding site that immunospecifically binds an antigen. The immunoglobulin molecules of the invention can be of any type (e.g., IgG, IgE, IgM, IgD, IgA and IgY), class (e.g., IgG1, IgG2, IgG3, IgG4, IgA1 and IgA2) or subclass of immunoglobulin molecule. In preferred embodiments, the immunoglobulin molecules of the invention are IgG1. In other preferred embodiments, the immunoglobulin molecules of the invention are IgG4.

[0228] Most preferably the antibodies are human antigen-binding antibody fragments of the present invention and include, but are not limited to, Fab, Fab′ and F(ab′)2, Fd, single-chain Fvs (scFv), single-chain antibodies, disulfide-linked Fvs (sdFv) and fragments comprising either a VL or VH domain. Antigen-binding antibody fragments, including single-chain antibodies, may comprise the variable region(s) alone or in combination with the entirety or a portion of the following: hinge region, CH1, CH2, and CH3 domains. Also included in the invention are antigen-binding fragments also comprising any combination of variable region(s) with a hinge region, CH1, CH2, and CH3 domains. The antibodies of the invention may be from any animal origin including birds and mammals. Preferably, the antibodies are human, murine (e.g., mouse and rat), donkey, ship rabbit, goat, guinea pig, camel, horse, or chicken. As used herein, “human” antibodies include antibodies having the amino acid sequence-of a human immunoglobulin and include antibodies isolated from human immunoglobulin libraries or from animals transgenic for one or more human immunoglobulin and that do not express endogenous immunoglobulins, as described infra and, for example in, U.S. Pat. No. 5,939,598 by Kucherlapati et al.

[0229] The antibodies of the present invention may be monospecific, bispecific, trispecific or of greater multispecificity. Multispecific antibodies may be specific for different epitopes of a polypeptide of the present invention or may be specific for both a polypeptide of the present invention as well as for a heterologous epitope, such as a heterologous polypeptide or solid support material. See, e.g., PCT publications WO 93/17715; WO 92108802; WO 91/00360; WO 92/05793; Tutt, et al., J. Immunol. 147:60-69 (1991); U.S. Pat. Nos. 4,474,893; 4,714,681; 4,925,648; 5,573,920; 5,601,819; Kostelny et al., J. Immunol. 148:1547-1553 (1992).

[0230] Antibodies of the present invention may be described or specified in terms of the epitope(s) or portion(s) of a polypeptide of the present invention which they recognize or specifically bind. The epitope(s) or polypeptide portion(s) may be specified as described herein, e.g., by N-terminal and C-terminal positions, or by size in contiguous amino acid residues, or listed in the Tables and Figures. Preferred epitopes of the invention include the predicted epitopes shown in column 7 of Table 1A, as well as polynucleotides that encode these epitopes. Antibodies which specifically bind any epitope or polypeptide of the present invention may also be excluded. Therefore, the present invention includes antibodies that specifically bind polypeptides of the present invention, and allows for the exclusion of the same.

[0231] Antibodies of the present invention may also be described or specified in terms of their cross-reactivity. Antibodies that do not bind any other analog, ortholog, or homolog of a polypeptide of the present invention are included. Antibodies that bind polypeptides with at least 95%, at least 90%, at least 85%, at least 80%, at least 75%, at least 70%, at least 65%, at least 60%, at least 55%, and at least 50% identity (as calculated using methods known in the art and described herein) to a polypeptide of the present invention are also included in the present invention. In specific embodiments, antibodies of the present invention cross-react with murine, rat and/or rabbit homologs of human proteins and the corresponding epitopes thereof. Antibodies that do not bind polypeptides with less than 95%, less than 90%, less than 85%, less than 80%, less than 75%, less than 70%, less than 65%, less than 60%, less than 55%, and less than 50% identity (as calculated using methods known in the art and described herein) to a polypeptide of the present invention are also included in the present invention. In a specific embodiment, the above-described cross-reactivity is with respect to any single specific antigenic or immunogenic polypeptide, or combination(s) of 2, 3, 4, 5, or more of the specific antigenic and/or immunogenic polypeptides disclosed herein. Further included in the present invention are antibodies which bind polypeptides encoded by polynucleotides which hybridize to a polynucleotide of the present invention under stringent hybridization conditions (as described herein). Antibodies of the present invention may also be described or specified in terms of their binding affinity to a polypeptide of the invention. Preferred binding affinities include those with a dissociation constant or Kd less than 5×10⁻² M, 10⁻² M, 5×10⁻³ M, 10⁻³ M, 5×10⁻⁴ M, 10⁻⁴ M, 5×10⁻⁵ M, 10⁻⁵ M, 5×10⁻⁶ M, 10⁻⁶M, 5×10⁻⁷ M, 10⁻⁷ M, 5×10⁻⁸ M, 10⁻⁸ M, 5×10⁻⁹ M, 10⁻⁹ M, 5×10⁻¹⁰ M, 10⁻¹⁰ M, 5×10⁻¹¹ M, 10⁻¹¹ M, 5×10⁻¹² M, 10⁻¹² M, 5×10⁻¹³ M, 10⁻¹³ M, 5×10⁻¹⁴ M, 10⁻¹⁴ M, 5×10⁻¹⁵ M, or 10⁻¹⁵ M.

[0232] The invention also provides antibodies that competitively inhibit binding of an antibody to an epitope of the invention as determined by any method known in the art for determining competitive binding, for example, the immunoassays described herein. In preferred embodiments, the antibody competitively inhibits binding to the epitope by at least 95%, at least 90%, at least 85%, at least 80%, at least 75%, at least 70%, at least 60%, or at least 50%.

[0233] Antibodies of the present invention may act as agonists or antagonists of the polypeptides of the present invention. For example, the present invention includes antibodies which disrupt the receptor/ligand interactions with the polypeptides of the invention either partially or fully. Preferably, antibodies of the present invention bind an antigenic epitope disclosed herein, or a portion thereof. The invention features both receptor-specific antibodies and ligand-specific antibodies. The invention also features receptor-specific antibodies which do not prevent ligand binding but prevent receptor activation. Receptor activation (i.e., signaling) may be determined by techniques described herein or otherwise known in the art. For example, receptor activation can be determined by detecting the phosphorylation (e.g., tyrosine or serine/threonine) of the receptor or its substrate by immunoprecipitation followed by western blot analysis (for example, as described supra). In specific embodiments, antibodies are provided that inhibit ligand activity or receptor activity by at least 95%, at least 90%, at least 85%, at least 80%, at least 75%, at least 70%, at least 60%, or at least 50% of the activity in absence of the antibody.

[0234] The invention also features receptor-specific antibodies which both prevent ligand binding and receptor activation as well as antibodies that recognize the receptor-ligand complex, and, preferably, do not specifically recognize the unbound receptor or the unbound ligand. Likewise, included in the invention are neutralizing antibodies which bind the ligand and prevent binding of the ligand to the receptor, as well as antibodies which bind the ligand, thereby preventing receptor activation, but do not prevent the ligand from binding the receptor. Further included in the invention are antibodies which activate the receptor. These antibodies may act as receptor agonists, i.e., potentiate or activate either all or a subset of the biological activities of the ligand-mediated receptor activation, for example, by inducing dimerization of the receptor. The antibodies may be specified as agonists, antagonists or inverse agonists for biological activities comprising the specific biological activities of the peptides of the invention disclosed herein. The above antibody agonists can be made using methods known in the art. See, e.g., PCT publication WO 96/40281; U.S. Pat. No. 5,811,097; Deng et al., Blood 92(6): 1981-1988 (1998); Chen et al., Cancer Res. 58(16): 3668-3678 (1998); Harrop et al., J. Immunol. 161(4): 1786-1794 (1998); Zhu et al., Cancer Res. 58(15): 3209-3214 (1998); Yoon et al., J. Immunol. 160(7): 3170-3179 (1998); Prat et al., J. Cell. Sci. lll(Pt2): 237-247 (1998); Pitard et al., J. Immunol. Methods 205(2): 177-190 (1997); Liautard et al., Cytokine 9(4): 233-241 (1997); Carlson et al., J. Biol. Chem. 272(17): 11295-11301 (1997); Taryman et al., Neuron 14(4): 755-762 (1995); Muller et al., Structure 6(9): 1153-1167 (1998); Bartunek et al., Cytokine ⁸(l): 14-20 (1996) (which are all incorporated by reference herein in their entireties).

[0235] Antibodies of the present invention may be used, for example, to purify, detect, and target the polypeptides of the present invention, including both in vitro and in vivo diagnostic and therapeutic methods. For example, the antibodies have utility in immunoassays for qualitatively and quantitatively measuring levels of the polypeptides of the present invention in biological samples. See, e.g., Harlow et al., Antibodies: A Laboratory Manual, (Cold Spring Harbor Laboratory Press, 2nd ed. 1988); incorporated by reference herein in its entirety.

[0236] As discussed in more detail below, the antibodies of the present invention may be used either alone or in combination with other compositions. The antibodies may further be recombinantly fused to a heterologous polypeptide at the N- or C-terminus or chemically conjugated (including covalent and non-covalent conjugations) to polypeptides or other compositions. For example, antibodies of the present invention may be recombinantly fused or conjugated to molecules useful as labels in detection assays and effector molecules such as heterologous polypeptides, drugs, radionuclides, or toxins. See, e.g., PCT publications WO 92/08495; WO 91/14438; WO 89/12624; U.S. Pat. No. 5,314,995; and EP 396,387; the disclosures of which are incorporated herein by reference in their entireties.

[0237] The antibodies of the invention include derivatives that are modified, i.e., by the covalent attachment of any type of molecule to the antibody such that covalent attachment does not prevent the antibody from generating an anti-idiotypic response. For example, but not by way of limitation, the antibody derivatives include antibodies that have been modified, e.g., by glycosylation, acetylation, pegylation, phosphylation, amidation, derivatization by known protecting/blocking groups, proteolytic cleavage, linkage to a cellular ligand or other protein, etc. Any of numerous chemical modifications may be carried out by known techniques, including, but not limited to specific chemical cleavage, acetylation, formylation, metabolic synthesis of tunicamycin, etc. Additionally, the derivative may contain one or more non-classical amino acids.

[0238] The antibodies of the present invention may be generated by any suitable method known in the art. Polyclonal antibodies to an antigen-of-interest can be produced by various procedures well known in the art. For example, a polypeptide of the invention can be administered to various host animals including, but not limited to, rabbits, mice, rats, etc. to induce the production of sera containing polyclonal antibodies specific for the antigen. Various adjuvants may be used to increase the immunological response, depending on the host species, and include but are not limited to, Freund's (complete and incomplete), mineral gels such as aluminum hydroxide, surface active substances such as lysolecithin, pluronic polyols, polyanions, peptides, oil emulsions, keyhole limpet hemocyanins, dinitrophenol, and potentially useful human adjuvants such as BCG (bacille Calmette-Guerin) and corynebacterium parvum. Such adjuvants are also well known in the art.

[0239] Monoclonal antibodies can be prepared using a wide variety of techniques known in the art including the use of hybridoma, recombinant, and phage display technologies, or a combination thereof. For example, monoclonal antibodies can be produced using hybridoma techniques including those known in the art and taught, for example, in Harlow et al., Antibodies: A Laboratory Manual, (Cold Spring Harbor Laboratory Press, 2nd ed. 1988); Hammerling, et al., in: Monoclonal Antibodies and T-Cell Hybridomas 563-681 (Elsevier, N.Y., 1981) (said references incorporated by reference in their entireties). The term “monoclonal antibody” as used herein is not limited to antibodies produced through hybridoma technology. The term “monoclonal antibody” refers to an antibody that is derived from a single clone, including any eukaryotic, prokaryotic, or phage clone, and not the method by which it is produced.

[0240] Methods for producing and screening for specific antibodies using hybridoma technology are routine and well known in the art and are discussed in detail in the Examples. In a non-limiting example, mice can be immunized with a polypeptide of the invention or a cell expressing such peptide. Once an immune response is detected, e.g., antibodies specific for the antigen are detected in the mouse serum, the mouse spleen is harvested and splenocytes isolated. The splenocytes are then fused by well known techniques to any suitable myeloma cells, for example cells from cell line SP20 available from the ATCC. Hybridomas are selected and cloned by limited dilution. The hybridoma clones are then assayed by methods known in the art for cells that secrete antibodies capable of binding a polypeptide of the invention. Ascites fluid, which generally contains high levels of antibodies, can be generated by immunizing mice with positive hybridoma clones.

[0241] Accordingly, the present invention provides methods of generating monoclonal antibodies as well as antibodies produced by the method comprising culturing a hybridoma cell secreting an antibody of the invention wherein, preferably, the hybridoma is generated by fusing splenocytes isolated from a mouse immunized with an antigen of the invention with myeloma cells and then screening the hybridomas resulting from the fusion for hybridoma clones that secrete an antibody able to bind a polypeptide of the invention.

[0242] Another well known method for producing both polyclonal and monoclonal human B cell lines is transformation using Epstein Barr Virus (EBV). Protocols for generating EBV-transformed B cell lines are commonly known in the art, such as, for example, the protocol outlined in Chapter 7.22 of Current Protocols in Immunology, Coligan et al., Eds., 1994, John Wiley & Sons, NY, which is hereby incorporated in its entirety by reference. The source of B cells for transformation is commonly human peripheral blood, but B cells for transformation may also be derived from other sources including, but not limited to, lymph nodes, tonsil, spleen, tumor tissue, and infected tissues. Tissues are generally made into single cell suspensions prior to EBV transformation. Additionally, steps may be taken to either physically remove or inactivate T cells (e.g., by treatment with cyclosporin A) in B cell-containing samples, because T cells from individuals seropositive for anti-EBV antibodies can suppress B cell immortalization by EBV.

[0243] In general, the sample containing human B cells is innoculated with EBV, and cultured for 3-4 weeks. A typical source of EBV is the culture supernatant of the B95-8 cell line (ATCC #VR-1492). Physical signs of EBV transformation can generally be seen towards the end of the 3-4 week culture period. By phase-contrast microscopy, transformed cells may appear large, clear, hairy and tend to aggregate in tight clusters of cells. Initially, EBV lines are generally polyclonal. However, over prolonged periods of cell cultures, EBV lines may become monoclonal or polyclonal as a result of the selective outgrowth of particular B cell clones. Alternatively, polyclonal EBV transformed lines may be subcloned (e.g., by limiting dilution culture) or fused with a suitable fusion partner and plated at limiting dilution to obtain monoclonal B cell lines. Suitable fusion partners for EBV transformed cell lines include mouse myeloma cell lines (e.g., SP2/0,×63-Ag8.653), heteromyeloma cell lines (human×mouse; e.g., SPAM-8, SBC-H20, and CB-F7), and human cell lines (e.g., GM 1500, SKO-007, RPMI 8226, and KR-4). Thus, the present invention also provides a method of generating polyclonal or monoclonal human antibodies against polypeptides of the invention or fragments thereof, comprising EBV-transformation of human B cells.

[0244] Antibody fragments which recognize specific epitopes may be generated by known techniques. For example, Fab and F(ab′)2 fragments of the invention may be produced by proteolytic cleavage of immunoglobulin molecules, using enzymes such as papain (to produce Fab fragments) or pepsin (to produce F(ab′)2 fragments). F(ab′)2 fragments contain the variable region, the light chain constant region and the CH1 domain of the heavy chain.

[0245] For example, the antibodies of the present invention can also be generated using various phage display methods known in the art. In phage display methods, functional antibody domains are displayed on the surface of phage particles which carry the polynucleotide sequences encoding them. In a particular embodiment, such phage can be utilized to display antigen binding domains expressed from a repertoire or combinatorial antibody library (e.g., human or murine). Phage expressing an antigen binding domain that binds the antigen of interest can be selected or identified with antigen, e.g., using labeled antigen or antigen bound or captured to a solid surface or bead. Phage used in these methods are typically filamentous phage including fd and Ml 3 binding domains expressed from phage with Fab, Fv or disulfide stabilized Fv antibody domains recombinantly fused to either the phage gene III or gene VIII protein. Examples of phage display methods that can be used to make the antibodies of the present invention include those disclosed in Brinkman et al., J. Immunol. Methods 182:41-50 (1995); Ames et al., J. Immunol. Methods 184:177-186 (1995); Kettleborough et al., Eur. J. Immunol. 24:952-958 (1994); Persic et al., Gene 187 9-18 (1997); Burton et al., Advances in Immunology 57:191-280 (1994); PCT application No. PCT/GB91/01134; PCT publications WO 90/02809; WO 91/10737; WO 92/01047; WO 92/18619; WO 93/11236; WO 95/15982; WO 95/20401; and U.S. Pat. Nos. 5,698,426; 5,223,409; 5,403,484; 5,580,717; 5,427,908; 5,750,753; 5,821,047; 5,571,698; 5,427,908; 5,516,637; 5,780,225; 5,658,727; 5,733,743 and 5,969,108; each of which is incorporated herein by reference in its entirety.

[0246] As described in the above references, after phage selection, the antibody coding regions from the phage can be isolated and used to generate whole antibodies, including human antibodies, or any other desired antigen binding fragment, and expressed in any desired host, including mammalian cells, insect cells, plant cells, yeast, and bacteria, e.g., as described in detail below. For example, techniques to recombinantly produce Fab, Fab′ and F(ab′)2 fragments can also be employed using methods known in the art such as those disclosed in PCT publication WO 92/22324; Mullinax et al., BloTechniques 12(6): 864-869 (1992); and Sawai et al., AJRI 34:26-34 (1995); and Better et al., Science 240:1041-1043 (1988) (said references incorporated by reference in their entireties).

[0247] Examples of techniques which can be used to produce single-chain Fvs and antibodies include those described in U.S. Patents 4,946,778 and 5,258,498; Huston et al., Methods in Enzymology 203:46-88 (1991); Shu et al., PNAS 90:7995-7999 (1993); and Skerra et al., Science 240:1038-1040 (1988). For some uses, including in vivo use of antibodies in humans and in vitro detection assays, it may be preferable to use chimeric, humanized, or human antibodies. A chimeric antibody is a molecule in which different portions of the antibody are derived from different animal species, such as antibodies having a variable region derived from a murine monoclonal antibody and a human immunoglobulin constant region. Methods for producing chimeric antibodies are known in the art. See e.g., Morrison, Science 229:1202 (1985); Oi et al., BioTechniques 4:214 (1986); Gillies et al., (1989) J. Immunol. Methods 125:191-202; U.S. Pat. Nos. 5,807,715; 4,816,567; and 4,816,397, which are incorporated herein by reference in their entirety. Humanized antibodies are antibody molecules from non-human species antibody that binds the desired antigen having one or more complementarity determining regions (CDRs) from the non-human species and a framework regions from a human immunoglobulin molecule. Often, framework residues in the human framework regions will be substituted with the corresponding residue from the CDR donor antibody to alter, preferably improve, antigen binding. These framework substitutions are identified by methods well known in the art, e.g., by modeling of the interactions of the CDR and framework residues to identify framework residues important for antigen binding and sequence comparison to identify unusual framework residues at particular positions. (See, e.g., Queen et al., U.S. Pat. No. 5,585,089; Riechmann et al., Nature 332:323 (1988), which are incorporated herein by reference in their entireties.) Antibodies can be humanized using a variety of techniques known in the art including, for example, CDR-grafting (EP 239,400; PCT publication WO 91/09967; U.S. Pat. Nos. 5,225,539; 5,530,101; and 5,585,089), veneering or resurfacing (EP 592,106; EP 519,596; Padlan, Molecular Immunology 28(4/5): 489-498 (1991); Studnicka et al., Protein Engineering 7(6): 805-814 (1994); Roguska. et al., PNAS 91:969-973 (1994)), and chain shuffling (U.S. Patent No. 5,565,332).

[0248] Completely human antibodies are particularly desirable for therapeutic treatment of human patients. Human antibodies can be made by a variety of methods known in the art including phage display methods described above using antibody libraries derived from human immunoglobulin sequences. See also, U.S. Pat. Nos. 4,444,887 and 4,716,111; and PCT publications WO 98/46645, WO 98/50433, WO 98/24893, WO 98/16654, WO 96/34096, WO 96/33735, and WO 91/10741; each of which is incorporated herein by reference in its entirety.

[0249] Human antibodies can also be produced using transgenic mice which are incapable of expressing functional endogenous immunoglobulins, but which can express human immunoglobulin genes. For example, the human heavy and light chain immunoglobulin gene complexes may be introduced randomly or by homologous recombination into mouse embryonic stem cells. Alternatively, the human variable region, constant region, and diversity region may be introduced into mouse embryonic stem cells in addition to the human heavy and light chain genes. The mouse heavy and light chain immunoglobulin genes may be rendered non-functional separately or simultaneously with the introduction of human immunoglobulin loci by homologous recombination. In particular, homozygous deletion of the JH region prevents endogenous antibody production. The modified embryonic stem cells are expanded and microinjected into blastocysts to produce chimeric mice. The chimeric mice are then bred to produce homozygous offspring which express human antibodies. The transgenic mice are immunized in the normal fashion with a selected antigen, e.g., all or a portion of a polypeptide of the invention. Monoclonal antibodies directed against the antigen can be obtained from the immunized, transgenic mice using conventional hybridoma technology. The human immunoglobulin transgenes harbored by the transgenic mice rearrange during B cell differentiation, and subsequently undergo class switching and somatic mutation. Thus, using such a technique, it is possible to produce therapeutically useful IgG, IgA, IgM and IgE antibodies. For an overview of this technology for producing human antibodies, see Lonberg and Huszar, Int. Rev. Immunol. 13:65-93 (1995). For a detailed discussion of this technology for producing human antibodies and human monoclonal antibodies and protocols for producing such antibodies, see, e.g., PCT publications WO 98/24893; WO 92/01047; WO 96/34096; WO 96/33735; European Patent No. 0 598 877; U.S. Pat. Nos. 5,413,923; 5,625,126; 5,633,425; 5,569,825; 5,661,016; 5,545,806; 5,814,318; 5,885,793; 5,916,771; 5,939,598; 6,075,181; and 6,114,598, which are incorporated by reference herein in their entirety. In addition, companies such as Abgenix, Inc. (Freemont, Calif.) and Genpharm (San Jose, Calif.) can be engaged to provide human antibodies directed against a selected antigen using technology similar to that described above.

[0250] Completely human antibodies which recognize a selected epitope can be generated using a technique referred to as “guided selection.” In this approach a selected non-human monoclonal antibody, e.g., a mouse antibody, is used to guide the selection of a completely human antibody recognizing the same epitope. (Jespers et al., Bio/technology 12:899-903 (1988)).

[0251] Further, antibodies to the polypeptides of the invention can, in turn, be utilized to generate anti-idiotype antibodies that “mimic” polypeptides of the invention using techniques well known to those skilled in the art. (See, e.g., Greenspan & Bona, FASEB J. 7(5): 437-444; (1989) and Nissinoff, J. Immunol. 147(8): 2429-2438 (1991)). For example, antibodies which bind to and competitively inhibit polypeptide multimerization and/or binding of a polypeptide of the invention to a ligand can be used to generate anti-idiotypes that “mimic” the polypeptide multimerization and/or binding domain and, as a consequence, bind to and neutralize polypeptide and/or its ligand. Such neutralizing anti-idiotypes or Fab fragments of such anti-idiotypes can be used in therapeutic regimens to neutralize polypeptide ligand(s)/receptor(s). For example, such anti-idiotypic antibodies can be used to bind a polypeptide of the invention and/or to bind its ligand(s)/receptor(s), and thereby block its biological activity. Alternatively, antibodies which bind to and enhance polypeptide multimerization and/or binding, and/or receptor/ligand multimerization, binding and/or signaling can be used to generate anti-idiotypes that function as agonists of a polypeptide of the invention and/or its ligand/receptor. Such agonistic anti-idiotypes or Fab fragments of such anti-idiotypes can be used in therapeutic regimens as agonists of the polypeptides of the invention or its ligand(s)/receptor(s). For example, such anti-idiotypic antibodies can be used to bind a polypeptide of the invention and/or to bind its ligand(s)/receptor(s), and thereby promote or enhance its biological activity.

[0252] Intrabodies of the invention can be produced using methods known in the art, such as those disclosed and reviewed in Chen et al., Hum. Gene Ther. 5:595-601 (1994); Marasco, W.A., Gene Ther. 4:11-15 (1997); Rondon and Marasco, Annu. Rev. Microbiol. 51:257-283 (1997); Proba et al., J. Mol. Biol. 275:245-253 (1998); Cohen et al., Oncogene 17:2445-2456 (1998); Ohage and Steipe, J. Mol. Biol. 291:1119-1128 (1999); Ohage et al., J. Mol. Biol. 291:1129-1134 (1999); Wirtz and Steipe, Protein Sci. 8:2245-2250 (1999); Zhu et al., J. Immunol. Methods 231:207-222 (1999); and references cited therein.

[0253] Polynucleotides Encoding Antibodies

[0254] The invention further provides polynucleotides comprising a nucleotide sequence encoding an antibody of the invention and fragments thereof. The invention also encompasses polynucleotides that hybridize under stringent or alternatively, under lower stringency hybridization conditions, e.g., as defined supra, to polynucleotides that encode an antibody, preferably, that specifically binds to a polypeptide of the invention, preferably, an antibody that binds to a polypeptide having the amino acid sequence of SEQ ID NO:Y, to a polypeptide encoded by a portion of SEQ ID NO:X as defined in columns 8 and 9 of Table 2, and/or to a polypeptide encoded by the cDNA contained in Clone ID NO:Z.

[0255] The polynucleotides may be obtained, and the nucleotide sequence of the polynucleotides determined, by any method known in the art. For example, if the nucleotide sequence of the antibody is known, a polynucleotide encoding the antibody may be assembled from chemically synthesized oligonucleotides (e.g., as described in Kutmeier et al., BioTechniques 17:242 (1994)), which, briefly, involves the synthesis of overlapping oligonucleotides containing portions of the sequence encoding the antibody, annealing and ligating of those oligonucleotides, and then amplification of the ligated oligonucleotides by PCR.

[0256] Alternatively, a polynucleotide encoding an antibody may be generated from nucleic acid from a suitable source. If a clone containing a nucleic acid encoding a particular antibody is not available, but the sequence of the antibody molecule is known, a nucleic acid encoding the immunoglobulin may be chemically synthesized or obtained from a suitable source (e.g., an antibody cDNA library, or a cDNA library generated from, or nucleic acid, preferably poly A+ RNA, isolated from, any tissue or cells expressing the antibody, such as hybridoma cells selected to express an antibody of the invention) by PCR amplification using synthetic primers hybridizable to the 3′ and 5′ ends of the sequence or by cloning using an oligonucleotide probe specific for the particular gene sequence to identify, e.g., a cDNA clone from a cDNA library that encodes the antibody. Amplified nucleic acids generated by PCR may then be cloned into replicable cloning vectors using any method well known in the art.

[0257] Once the nucleotide sequence and corresponding amino acid sequence of the antibody is determined, the nucleotide sequence of the antibody may be manipulated using methods well known in the art for the manipulation of nucleotide sequences, e.g., recombinant DNA techniques, site directed mutagenesis, PCR, etc. (see, for example, the techniques described in Sambrook et al., 1990, Molecular Cloning, A Laboratory Manual, 2d Ed., Cold Spring Harbor Laboratory, Cold Spring Harbor, N.Y. and Ausubel et al., eds., 1998, Current Protocols in Molecular Biology, John Wiley & Sons, NY, which are both incorporated by reference herein in their entireties ), to generate antibodies having a different amino acid sequence, for example to create amino acid substitutions, deletions, and/or insertions.

[0258] In a specific embodiment, the amino acid sequence of the heavy and/or light chain variable domains may be inspected to identify the sequences of the complementarity determining regions (CDRs) by methods that are well know in the art, e.g., by comparison to known amino acid sequences of other heavy and light chain variable regions to determine the regions of sequence hypervariability. Using routine recombinant DNA techniques, one or more of the CDRs may be inserted within framework regions, e.g., into human framework regions to humanize a non-human antibody, as described supra. The framework regions may be naturally occurring or consensus framework regions, and preferably human framework regions (see, e.g., Chothia et al., J. Mol. Biol. 278: 457-479 (1998) for a listing of human framework regions). Preferably, the polynucleotide generated by the combination of the framework regions and CDRs encodes an antibody that specifically binds a polypeptide of the invention. Preferably, as discussed supra, one or more amino acid substitutions may be made within the framework regions, and, preferably, the amino acid substitutions improve binding of the antibody to its antigen. Additionally, such methods may be used to make amino acid substitutions or deletions of one or more variable region cysteine residues participating in an intrachain disulfide bond to generate antibody molecules lacking one or more intrachain disulfide bonds. Other alterations to the polynucleotide are encompassed by the present invention and within the skill of the art.

[0259] In addition, techniques developed for the production of “chimeric antibodies” (Morrison et al., Proc. Natl. Acad. Sci. 81:851-855 (1984); Neuberger et al., Nature 312:604-608 (1984); Takeda et al., Nature 314:452-454 (1985)) by splicing genes from a mouse antibody molecule of appropriate antigen specificity together with genes from a human antibody molecule of appropriate biological activity can be used. As described supra, a chimeric antibody is a molecule in which different portions are derived from different animal species, such as those having a variable region derived from a murine mAb and a human immunoglobulin constant region, e.g., humanized antibodies.

[0260] Alternatively, techniques described for the production of single chain antibodies (U.S. Pat. No. 4,946,778; Bird, Science 242:423-42 (1988); Huston et al., Proc. Natl. Acad. Sci. USA 85:5879-5883 (1988); and Ward et al., Nature 334:544-54 (1989)) can be adapted to produce single chain antibodies. Single chain antibodies are formed by linking the heavy and light chain fragments of the Fv region via an amino acid bridge, resulting in a single chain polypeptide. Techniques for the assembly of functional Fv fragments in E. coli may also be used (Skerra et al., Science 242:1038-1041 (1988)).

[0261] Methods of Producing Antibodies

[0262] The antibodies of the invention can be produced by any method known in the art for the synthesis of antibodies, in particular, by chemical synthesis or preferably, by recombinant expression techniques. Methods of producing antibodies include, but are not limited to, hybridoma technology, EBV transformation, and other methods discussed herein as well as through the use recombinant DNA technology, as discussed below.

[0263] Recombinant expression of an antibody of the invention, or fragment, derivative or analog thereof, (e.g., a heavy or light chain of an antibody of the invention or a single chain antibody of the invention), requires construction of an expression vector containing a polynucleotide that encodes the antibody. Once a polynucleotide encoding an antibody molecule or a heavy or light chain of an antibody, or portion thereof (preferably containing the heavy or light chain variable domain), of the invention has been obtained, the vector for the production of the antibody molecule may be produced by recombinant DNA technology using techniques well known in the art. Thus, methods for preparing a protein by expressing a polynucleotide containing an antibody encoding nucleotide sequence are described herein. Methods which are well known to those skilled in the art can be used to construct expression vectors containing antibody coding sequences and appropriate transcriptional and translational control signals. These methods include, for example, in vitro recombinant DNA techniques, synthetic techniques, and in vivo genetic recombination. The invention, thus, provides replicable vectors comprising a nucleotide sequence encoding an antibody molecule of the invention, or a heavy or light chain thereof, or a heavy or light chain variable domain, operably linked to a promoter. Such vectors may include the nucleotide sequence encoding the constant region of the antibody molecule (see, e.g., PCT Publication WO 86/05807; PCT Publication WO 89/01036; and U.S. Pat. No. 5,122,464) and the variable domain of the antibody may be cloned into such a vector for expression of the entire heavy or light chain.

[0264] The expression vector is transferred to a host cell by conventional techniques and the transfected cells are then cultured by conventional techniques to produce an antibody of the invention. Thus, the invention includes host cells containing a polynucleotide encoding an antibody of the invention, or a heavy or light chain thereof, or a single chain antibody of the invention, operably linked to a heterologous promoter. In preferred embodiments for the expression of double-chained antibodies, vectors encoding both the heavy and light chains may be co-expressed in the host cell for expression of the entire immunoglobulin molecule, as detailed below.

[0265] A variety of host-expression vector systems may be utilized to express the antibody molecules of the invention. Such host-expression systems represent vehicles by which the coding sequences of interest may be produced and subsequently purified, but also represent cells which may, when transformed or transfected with the appropriate nucleotide coding sequences, express an antibody molecule of the invention in situ. These include but are not limited to microorganisms such as bacteria (e.g., E. coli, B. subtilis) transformed with recombinant bacteriophage DNA, plasmid DNA or cosmid DNA expression vectors containing antibody coding sequences; yeast (e.g., Saccharomyces, Pichia) transformed with recombinant yeast expression vectors containing antibody coding sequences; insect cell systems infected with recombinant virus expression vectors (e.g., baculovirus) containing antibody coding sequences; plant cell systems infected with recombinant virus expression vectors (e.g., cauliflower mosaic virus, CaMV; tobacco mosaic virus, TMV) or transformed with recombinant plasmid expression vectors (e.g., Ti plasmid) containing antibody coding sequences; or mammalian cell systems (e.g., COS, CHO, BHK, 293, 3T3 cells) harboring recombinant expression constructs containing promoters derived from the genome of mammalian cells (e.g., metallothionein promoter) or from mammalian viruses (e.g., the adenovirus late promoter; the vaccinia virus 7.5K promoter). Preferably, bacterial cells such as Escherichia coli, and more preferably, eukaryotic cells, especially for the expression of whole recombinant antibody molecule, are used for the expression of a recombinant antibody molecule. For example, mammalian cells such as Chinese hamster ovary cells (CHO), in conjunction with a vector such as the major intermediate early gene promoter element from human cytomegalovirus is an effective expression system for antibodies (Foecking et al., Gene 45:101 (1986); Cockett et al., Bio/Technology 8:2 (1990)).

[0266] In bacterial systems, a number of expression vectors may be advantageously selected depending upon the use intended for the antibody molecule being expressed. For example, when a large quantity of such a protein is to be produced, for the generation of pharmaceutical compositions of an antibody molecule, vectors which direct the expression of high levels of fusion protein products that are readily purified may be desirable. Such vectors include, but are not limited, to the E. coli expression vector pUR278 (Ruther et al., EMBO J. 2:1791 (1983)), in which the antibody coding sequence may be ligated individually into the vector in frame with the lac Z coding region so that a fusion protein is produced; pIN vectors (Inouye & Inouye, Nucleic Acids Res. 13:3101-3109 (1985); Van Heeke & Schuster, J. Biol. Chem. 24:5503-5509 (1989)); and the like. pGEX vectors may also be used to express foreign polypeptides as fusion proteins with glutathione S-transferase (GST). In general, such fusion proteins are soluble and can easily be purified from lysed cells by adsorption and binding to matrix glutathione-agarose beads followed by elution in the presence of free glutathione. The pGEX vectors are designed to include thrombin or factor Xa protease cleavage sites so that the cloned target gene product can be released from the GST moiety.

[0267] In an insect system, Autographa californica nuclear polyhedrosis virus (AcNPV) is used as a vector to express foreign genes. The virus grows in Spodoptera frugiperda cells. The antibody coding sequence may be cloned individually into non-essential regions (for example the polyhedrin gene) of the virus and placed under control of an AcNPV promoter (for example the polyhedrin promoter).

[0268] In mammalian host cells, a number of viral-based expression systems may be utilized. In cases where an adenovirus is used as an expression vector, the antibody coding sequence of interest may be ligated to an adenovirus transcription/translation control complex, e.g., the late promoter and tripartite leader sequence. This chimeric gene may then be inserted in the adenovirus genome by in vitro or in vivo recombination. Insertion in a non-essential region of the viral genome (e.g., region E1 or E3) will result in a recombinant virus that is viable and capable of expressing the antibody molecule in infected hosts. (e.g., see Logan & Shenk, Proc. Natl. Acad. Sci. USA 81:355-359 (1984)). Specific initiation signals may also be required for efficient translation of inserted antibody coding sequences. These signals include the ATG initiation codon and adjacent sequences. Furthermore, the initiation codon must be in phase with the reading frame of the desired coding sequence to ensure translation of the entire insert. These exogenous translational control signals and initiation codons can be of a variety of origins, both natural and synthetic. The efficiency of expression may be enhanced by the inclusion of appropriate transcription enhancer elements, transcription terminators, etc. (see Bittner et al., Methods in Enzymol. 153:51-544 (1987)).

[0269] In addition, a host cell strain may be chosen which modulates the expression of the inserted sequences, or modifies and processes the gene product in the specific fashion desired. Such modifications (e.g., glycosylation) and processing (e.g., cleavage) of protein products may be important for the function of the protein. Different host cells have characteristic and specific mechanisms for the post-translational processing and modification of proteins and gene products. Appropriate cell lines or host systems can be chosen to ensure the correct modification and processing of the foreign protein expressed. To this end, eukaryotic host cells which possess the cellular machinery for proper processing of the primary transcript, glycosylation, and phosphorylation of the gene product may be used. Such mammalian host cells include but are not limited to CHO, VERY, BHK, Hela, COS, MDCK, 293, 3T3, WI38, and in particular, breast cancer cell lines such as, for example, BT483, Hs578T, HTB2, BT20 and T47D, and normal mammary gland cell line such as, for example, CRL7030 and Hs578Bst.

[0270] For long-term, high-yield production of recombinant proteins, stable expression is preferred. For example, cell lines which stably express the antibody molecule may be engineered. Rather than using expression vectors which contain viral origins of replication, host cells can be transformed with DNA controlled by appropriate expression control elements (e.g., promoter, enhancer, sequences, transcription terminators, polyadenylation sites, etc.), and a selectable marker. Following the introduction of the foreign DNA, engineered cells may be allowed to grow for 1-2 days in an enriched media, and then are switched to a selective media. The selectable marker in the recombinant plasmid confers resistance to the selection and allows cells to stably integrate the plasmid into their chromosomes and grow to form foci which in turn can be cloned and expanded into cell lines. This method may advantageously be used to engineer cell lines which express the antibody molecule. Such engineered cell lines may be particularly useful in screening and evaluation of compounds that interact directly or indirectly with the antibody molecule.

[0271] A number of selection systems may be used, including but not limited to the herpes simplex virus thymidine kinase (Wigler et al., Cell 11:223 (1977)), hypoxanthine-guanine phosphoribosyltransferase (Szybalska & Szybalski, Proc. Natl. Acad. Sci. USA 48:202 (1992)), and adenine phosphoribosyltransferase (Lowy et al., Cell 22:817 (1980)) genes can be employed in tk-, hgprt- or aprt-cells, respectively. Also, antimetabolite resistance can be used as the basis of selection for the following genes: dhfr, which confers resistance to methotrexate (Wigler et al., Natl. Acad. Sci. USA 77:357 (1980); O'Hare et al., Proc. Natl. Acad. Sci. USA 78:1527 (1981)); gpt, which confers resistance to mycophenolic acid (Mulligan & Berg, Proc. Natl. Acad. Sci. USA 78:2072 (1981)); neo, which confers resistance to the aminoglycoside G-418 Clinical Pharmacy 12:488-505; Wu and Wu, Biotherapy 3:87-95 (1991); Tolstoshev, Ann. Rev. Pharmacol. Toxicol. 32:573-596 (1993); Mulligan, Science 260:926-932 (1993); and Morgan and Anderson, Ann. Rev. Biochem. 62:191-217 (1993); May, 1993, TIB TECH 11(5): 155-215 (1993)); and hygro, which confers resistance to hygromycin (Santerre et al., Gene 30:147 (1984)). Methods commonly known in the art of recombinant DNA technology may be routinely applied to select the desired recombinant clone, and such methods are described, for example, in Ausubel et al. (eds.), Current Protocols in Molecular Biology, John Wiley & Sons, NY (1993); Kriegler, Gene Transfer and Expression, A Laboratory Manual, Stockton Press, NY (1990); and in Chapters 12 and 13, Dracopoli et al. (eds), Current Protocols in Human Genetics, John Wiley & Sons, NY (1994); Colberre-Garapin et al., J. Mol. Biol. 150:1 (1981), which are incorporated by reference herein in their entireties.

[0272] The expression levels of an antibody molecule can be increased by vector amplification (for a review, see Bebbington and Hentschel, The use of vectors based on gene amplification for the expression of cloned genes in mammalian cells in DNA cloning, Vol.3. (Academic Press, New York, 1987)). When a marker in the vector system expressing antibody is amplifiable, increase in the level of inhibitor present in culture of host cell will increase the number of copies of the marker gene. Since the amplified region is associated with the antibody gene, production of the antibody will also increase (Crouse et al., Mol. Cell. Biol. 3:257 (1983)).

[0273] Vectors which use glutamine synthase (GS) or DHFR as the selectable markers can be amplified in the presence of the drugs methionine sulphoximine or methotrexate, respectively. An advantage of glutamine synthase based vectors are the availabilty of cell lines (e.g., the murine myeloma cell line, NSO) which are glutamine synthase negative. Glutamine synthase expression systems can also function in glutamine synthase expressing cells (e.g. Chinese Hamster Ovary (CHO) cells) by providing additional inhibitor to prevent the functioning of the endogenous gene. A glutamine synthase expression system and components thereof are detailed in PCT publications: WO87/04462; WO86/05807; WO89/01036; WO89/10404; and WO91/06657 which are incorporated in their entireties by reference herein. Additionally, glutamine synthase expression vectors that may be used according to the present invention are commercially available from suplliers, including, for example Lonza Biologics, Inc. (Portsmouth, N.H.). Expression and production of monoclonal antibodies using a GS expression system in murine myeloma cells is described in Bebbington et al., Bio/technology 10:169(1992) and in Biblia and Robinson Biotechnol. Prog. 11:1 (1995) which are incorporated in their entirities by reference herein.

[0274] The host cell may be co-transfected with two expression vectors of the invention, the first vector encoding a heavy chain derived polypeptide and the second vector encoding a light chain derived polypeptide. The two vectors may contain identical selectable markers which enable equal expression of heavy and light chain polypeptides. Alternatively, a single vector may be used which encodes, and is capable of expressing, both heavy and light chain polypeptides. In such situations, the light chain should be placed before the heavy chain to avoid an excess of toxic free heavy chain (Proudfoot, Nature 322:52 (1986); Kohler, Proc. Natl. Acad. Sci. USA 77:2197 (1980)). The coding sequences for the heavy and light chains may comprise cDNA or genomic DNA.

[0275] Once an antibody molecule of the invention has been produced by an animal, chemically synthesized, or recombinantly expressed, it may be purified by any method known in the art for purification of an immunoglobulin molecule, for example, by chromatography (e.g., ion exchange, affinity, particularly by affinity for the specific antigen after Protein A, and sizing column chromatography), centrifugation, differential solubility, or by any other standard technique for the purification of proteins. In addition, the antibodies of the present invention or fragments thereof can be fused to heterologous polypeptide sequences described herein or otherwise known in the art, to facilitate purification.

[0276] The present invention encompasses antibodies recombinantly fused or chemically conjugated (including both covalently and non-covalently conjugations) to a polypeptide (or portion thereof, preferably at least 10, 20, 30, 40, 50, 60, 70, 80, 90 or 100 amino acids of the polypeptide) of the present invention to generate fusion proteins. The fusion does not necessarily need to be direct, but may occur through linker sequences. The antibodies may be specific for antigens other than polypeptides (or portion thereof, preferably at least 10, 20, 30, 40, 50, 60, 70, 80, 90 or 100 amino acids of the polypeptide) of the present invention. For example, antibodies may be used to target the polypeptides of the present invention to particular cell types, either in vitro or in vivo, by fusing or conjugating the polypeptides of the present invention to antibodies specific for particular cell surface receptors. Antibodies fused or conjugated to the polypeptides of the present invention may also be used in in vitro immunoassays and purification methods using methods known in the art. See e.g., Harbor et al., supra, and PCT publication WO 93/21232; EP 439,095; Naramura et al., Immunol. Lett. 39:91-99 (1994); U.S. Pat. No. 5,474,981; Gillies et al., PNAS 89:1428-1432 (1992); Fell et al., J. Immunol. 146:2446-2452 (1991), which are incorporated by reference in their entireties.

[0277] The present invention further includes compositions comprising the polypeptides of the present invention fused or conjugated to antibody domains other than the variable regions. For example, the polypeptides of the present invention may be fused or conjugated to an antibody Fc region, or portion thereof. The antibody portion fused to a polypeptide of the present invention may comprise the constant region, hinge region, CH 1 domain, CH2 domain, and CH3 domain or any combination of whole domains or portions thereof. The polypeptides may also be fused or conjugated to the above antibody portions to form multimers. For example, Fc portions fused to the polypeptides of the present invention can form dimers through disulfide bonding between the Fc portions. Higher multimeric forms can be made by fusing the polypeptides to portions of IgA and IgM. Methods for fusing or conjugating the polypeptides of the present invention to antibody portions are known in the art. See, e.g., U.S. Pat. Nos. 5,336,603; 5,622,929; 5,359,046; 5,349,053; 5,447,851; 5,112,946; EP 307,434; EP 367,166; PCT publications WO 96/04388; WO 91/06570; Ashkenazi et al., Proc. Natl. Acad. Sci. USA 88:10535-10539 (1991); Zheng et al., J. Immunol. 154:5590-5600 (1995); and Vil et al., Proc. Natl. Acad. Sci. USA 89:11337-11341 (1992) (said references incorporated by reference in their entireties).

[0278] As discussed, supra, the polypeptides corresponding to a polypeptide, polypeptide fragment, or a variant of SEQ ID NO:Y may be fused or conjugated to the above antibody portions to increase the in vivo half life of the polypeptides or for use in immunoassays using methods known in the art. Further, the polypeptides corresponding to SEQ ID NO:Y may be fused or conjugated to the above antibody portions to facilitate purification. One reported example describes chimeric proteins consisting of the first two domains of the human CD4-polypeptide and various domains of the constant regions of the heavy or light chains of mammalian immunoglobulins. See EP 394,827; and Traunecker et al., Nature 331:84-86 (1988). The polypeptides of the present invention fused or conjugated to an antibody having disulfide-linked dimeric structures (due to the IgG) may also be more efficient in binding and neutralizing other molecules, than the monomeric secreted protein or protein fragment alone. See, for example, Fountoulakis et al., J. Biochem. 270:3958-3964 (1995). In many cases, the Fc part in a fusion protein is beneficial in therapy and diagnosis, and thus can result in, for example, improved pharmacokinetic properties. See, for example, EP A 232,262. Alternatively, deleting the Fc part after the fusion protein has been expressed, detected, and purified, would be desired. For example, the Fc portion may hinder therapy and diagnosis if the fusion protein is used as an antigen for immunizations. In drug discovery, for example, human proteins, such as hIL-5, have been fused with Fc portions for the purpose of high-throughput screening assays to identify antagonists of hIL-5. (See, Bennett et al., J. Molecular Recognition 8:52-58 (1995); Johanson et al., J. Biol. Chem. 270:9459-9471 (1995)).

[0279] Moreover, the antibodies or fragments thereof of the present invention can be fused to marker sequences, such as a peptide to facilitate purification. In preferred embodiments, the marker amino acid sequence is a hexa-histidine peptide, such as the tag provided in a pQE vector (QIAGEN, Inc., 9259 Eton Avenue, Chatsworth, Calif., 91311), among others, many of which are commercially available. As described in Gentz et al., Proc. Natl. Acad. Sci. USA 86:821-824 (1989), for instance, hexa-histidine provides for convenient purification of the fusion protein. Other peptide tags useful for purification include, but are not limited to, the “HA” tag, which corresponds to an epitope derived from the influenza hemagglutinin protein (Wilson et al., Cell 37:767 (1984)) and the “flag” tag.

[0280] The present invention further encompasses antibodies or fragments thereof conjugated to a diagnostic or therapeutic agent. The antibodies can be used diagnostically to, for example, monitor the development or progression of a tumor as part of a clinical testing procedure to, e.g., determine the efficacy of a given treatment regimen. Detection can be facilitated by coupling the antibody to a detectable substance. Examples of detectable substances include various enzymes, prosthetic groups, fluorescent materials, luminescent materials, bioluminescent materials, radioactive materials, positron emitting metals using various positron emission tomographies, and nonradioactive paramagnetic metal ions. The detectable substance may be coupled or conjugated either directly to the antibody (or fragment thereof) or indirectly, through an intermediate (such as, for example, a linker known in the art) using techniques known in the art. See, for example, U.S. Pat. No. 4,741,900 for metal ions which can be conjugated to antibodies for use as diagnostics according to the present invention. Examples of suitable enzymes include horseradish peroxidase, alkaline phosphatase, beta-galactosidase, or acetylcholinesterase; examples of suitable prosthetic group complexes include streptavidin/biotin and avidin/biotin; examples of suitable fluorescent materials include umbelliferone, fluorescein, fluorescein isothiocyanate, rhodamine, dichlorotriazinylamine fluorescein, dansyl chloride or phycoerythrin; an example of a luminescent material includes luminol; examples of bioluminescent materials include luciferase, luciferin, and aequorin; and examples of suitable radioactive material include 125I, 131I, 111In or 99Tc.

[0281] Further, an antibody or fragment thereof may be conjugated to a therapeutic moiety such as a cytotoxin, e.g., a cytostatic or cytocidal agent, a therapeutic agent or a radioactive metal ion, e.g., alpha-emitters such as, for example, 213Bi. A cytotoxin or cytotoxic agent includes any agent that is detrimental to cells. Examples include paclitaxol, cytochalasin B, gramicidin D, ethidium bromide, emetine, mitomycin, etoposide, tenoposide, vincristine, vinblastine, colchicin, doxorubicin, daunorubicin, dihydroxy anthracin dione, mitoxantrone, mithramycin, actinomycin D, 1-dehydrotestosterone, glucocorticoids, procaine, tetracaine, lidocaine, propranolol, and puromycin and analogs or homologs thereof. Therapeutic agents include, but are not limited to, antimetabolites (e.g., methotrexate, 6-mercaptopurine, 6-thioguanine, cytarabine, 5-fluorouracil decarbazine), alkylating agents (e.g., mechlorethamine, thioepa chlorambucil, melphalan, carmustine (BSNU) and lomustine (CCNU), cyclothosphamide, busulfan, dibromomannitol, streptozotocin, mitomycin C, and cis-dichlorodiamine platinum (II) (DDP) cisplatin), anthracyclines (e.g., daunorubicin (formerly daunomycin) and doxorubicin), antibiotics (e.g., dactinomycin (formerly actinomycin), bleomycin, mithramycin, and anthramycin (AMC)), and anti-mitotic agents (e.g., vincristine and vinblastine).

[0282] The conjugates of the invention can be used for modifying a given biological response, the therapeutic agent or drug moiety is not to be construed as limited to classical chemical therapeutic agents. For example, the drug moiety may be a protein or polypeptide possessing a desired biological activity. Such proteins may include, for example, a toxin such as abrin, ricin A, pseudomonas exotoxin, or diphtheria toxin; a protein such as tumor necrosis factor, a-interferon, β-interferon, nerve growth factor, platelet derived growth factor, tissue plasminogen activator, an apoptotic agent, e.g., TNF-alpha, TNF-beta, AIM I (See, International Publication No. WO 97/33899), AIM II (See, International Publication No. WO 97/34911), Fas Ligand (Takahashi et al., Int. Immunol., 6:1567-1574 (1994)), VEGI (See, International Publication No. WO 99/23105), a thrombotic agent or an anti-angiogenic agent, e.g., angiostatin or endostatin; or, biological response modifiers such as, for example, lymphokines, interleukin-1 (“IL-1”), interleukin-2 (“IL-2”), interleukin-6 (“IL-6”), granulocyte macrophage colony stimulating factor (“GM-CSF”), granulocyte colony stimulating factor (“G-CSF”), or other growth factors.

[0283] Antibodies may also be attached to solid supports, which are particularly useful for immunoassays or purification of the target antigen. Such solid supports include, but are not limited to, glass, cellulose, polyacrylamide, nylon, polystyrene, polyvinyl chloride or polypropylene.

[0284] Techniques for conjugating such therapeutic moiety to antibodies are well known. See, for example, Arnon et al., “Monoclonal Antibodies For Immunotargeting Of Drugs In Cancer Therapy”, in Monoclonal Antibodies And Cancer Therapy, Reisfeld et al. (eds.), pp. 243-56 (Alan R. Liss, Inc. 1985); Hellstrom et al., “Antibodies For Drug Delivery”, in Controlled Drug Delivery (2nd Ed.), Robinson et al. (eds.), pp. 623-53 (Marcel Dekker, Inc. 1987); Thorpe, “Antibody Carriers Of Cytotoxic Agents In Cancer Therapy: A Review”, in Monoclonal Antibodies '84: Biological And Clinical Applications, Pinchera et al. (eds.), pp. 475-506 (1985); “Analysis, Results, And Future Prospective Of The Therapeutic Use Of Radiolabeled Antibody In Cancer Therapy”, in Monoclonal Antibodies For Cancer Detection And Therapy, Baldwin et al. (eds.), pp. 303-16 (Academic Press 1985), and Thorpe et al., “The Preparation And Cytotoxic Properties Of Antibody-Toxin Conjugates”, Immunol. Rev. 62:119-58 (1982).

[0285] Alternatively, an antibody can be conjugated to a second antibody to form an antibody heteroconjugate as described by Segal in U.S. Pat. No. 4,676,980, which is incorporated herein by reference in its entirety.

[0286] An antibody, with or without a therapeutic moiety conjugated to it, administered alone or in combination with cytotoxic factor(s) and/or cytokine(s) can be used as a therapeutic.

[0287] Immunophenotyping

[0288] The antibodies of the invention may be utilized for immunophenotyping of cell lines and biological samples. Translation products of the gene of the present invention may be useful as cell-specific markers, or more specifically as cellular markers that are differentially expressed at various stages of differentiation and/or maturation of particular cell types. Monoclonal antibodies directed against a specific epitope, or combination of epitopes, will allow for the screening of cellular populations expressing the marker. Various techniques can be utilized using monoclonal antibodies to screen for cellular populations expressing the marker(s), and include magnetic separation using antibody-coated magnetic beads, “panning” with antibody attached to a solid matrix (i.e., plate), and flow cytometry (See, e.g., U.S. Pat. No. 5,985,660; and Morrison et al., Cell, 96:737-49 (1999)).

[0289] These techniques allow for the screening of particular populations of cells, such as might be found with hematological malignancies (i.e. minimal residual disease (MRD) in acute leukemic patients) and “non-self” cells in transplantations to prevent Graft-versus-Host Disease (GVHD). Alternatively, these techniques allow for the screening of hematopoietic stem and progenitor cells capable of undergoing proliferation and/or differentiation, as might be found in human umbilical cord blood.

[0290] Assays For Antibody Binding

[0291] The antibodies of the invention may be assayed for immunospecific binding by any method known in the art. The immunoassays which can be used include but are not limited to competitive and non-competitive assay systems using techniques such as western blots, radioimmunoassays, ELISA (enzyme linked immunosorbent assay), “sandwich” immunoassays, immunoprecipitation assays, precipitin reactions, gel diffusion precipitin reactions, immunodiffusion assays, agglutination assays, complement-fixation assays, immunoradiometric assays, fluorescent immunoassays, and protein A immunoassays, to name but a few. Such assays are routine and well known in the art (see, e.g., Ausubel et al, eds, 1994, Current Protocols in Molecular Biology, Vol. 1, John Wiley & Sons, Inc., New York, which is incorporated by reference herein in its entirety). Exemplary immunoassays are described briefly below (but are not intended by way of limitation).

[0292] Immunoprecipitation protocols generally comprise lysing a population of cells in a lysis buffer such as RIPA buffer (1% NP40 or Triton X-100, 1% sodium deoxycholate, 0.1% SDS, 0.15 M NaCl, 0.01 M sodium phosphate at pH 7.2, 1% Trasylol) supplemented with protein phosphatase and/or protease inhibitors (e.g., EDTA, PMSF, aprotinin, sodium vanadate), adding the antibody of interest to the cell lysate, incubating for a period of time (e.g., 1-4 hours) at 4° C., adding protein A and/or protein G sepharose beads to the cell lysate, incubating for about an hour or more at 4° C., washing the beads in lysis buffer and resuspending the beads in SDS/sample buffer. The ability of the antibody of interest to immunoprecipitate a particular antigen can be assessed by, e.g., western blot analysis. One of skill in the art would be knowledgeable as to the parameters that can be modified to increase the binding of the antibody to an antigen and decrease the background (e.g., pre-clearing the cell lysate with sepharose beads). For further discussion regarding immunoprecipitation protocols see, e.g., Ausubel et al., eds., (1994), Current Protocols in Molecular Biology, Vol. 1, John Wiley & Sons, Inc., New York, section 10.16.1.

[0293] Western blot analysis generally comprises preparing protein samples, electrophoresis of the protein samples in a polyacrylamide gel (e.g., 8%-20% SDS-PAGE depending on the molecular weight of the antigen), transferring the protein sample from the polyacrylamide gel to a membrane such as nitrocellulose, PVDF or nylon, blocking the membrane in blocking solution (e.g., PBS with 3% BSA or non-fat milk), washing the membrane in washing buffer (e.g., PBS-Tween 20), blocking the membrane with primary antibody (the antibody of interest) diluted in blocking buffer, washing the membrane in washing buffer, blocking the membrane with a secondary antibody (which recognizes the primary antibody, e.g., an anti-human antibody) conjugated to an enzymatic substrate (e.g., horseradish peroxidase or alkaline phosphatase) or radioactive molecule (e.g., 32P or 125I) diluted in blocking buffer, washing the membrane in wash buffer, and detecting the presence of the antigen. One of skill in the art would be knowledgeable as to the parameters that can be modified to increase the signal detected and to reduce the background noise. For further discussion regarding western blot protocols see, e.g., Ausubel et al, eds, (1994), Current Protocols in Molecular Biology, Vol. 1, John Wiley & Sons, Inc., New York, section 10.8.1.

[0294] ELISAs comprise preparing antigen, coating the well of a 96 well microtiter plate with the antigen, adding the antibody of interest conjugated to a detectable compound such as an enzymatic substrate (e.g., horseradish peroxidase or alkaline phosphatase) to the well and incubating for a period of time, and detecting the presence of the antigen. In ELISAs the antibody of interest does not have to be conjugated to a detectable compound; instead, a second antibody (which recognizes the antibody of interest) conjugated to a detectable compound may be added to the well. Further, instead of coating the well with the antigen, the antibody may be coated to the well. In this case, a second antibody conjugated to a detectable compound may be added following the addition of the antigen of interest to the coated well. One of skill in the art would be knowledgeable as to the parameters that can be modified to increase the signal detected as well as other variations of ELISAs known in the art. For farther discussion regarding ELISAs see, e.g., Ausubel et al, eds, (1994), Current Protocols in Molecular Biology, Vol. 1, John Wiley & Sons, Inc., New York, section 11.2.1.

[0295] The binding affinity of an antibody to an antigen and the off-rate of an antibody-antigen interaction can be determined by competitive binding assays. One example of a competitive binding assay is a radioimmunoassay comprising the incubation of labeled antigen (e.g., 3H or 125I) with the antibody of interest in the presence of increasing amounts of unlabeled antigen, and the detection of the antibody bound to the labeled antigen. The affinity of the antibody of interest for a particular antigen and the binding off-rates can be determined from the data by scatchard plot analysis. Competition with a second antibody can also be determined using radioimmunoassays. In this case, the antigen is incubated with antibody of interest conjugated to a labeled compound (e.g., 3H or 125I) in the presence of increasing amounts of an unlabeled second antibody.

[0296] Antibodies of the invention may be characterized using immunocytochemisty methods on cells (e.g., mammalian cells, such as CHO cells) transfected with a vector enabling the expression of an antigen or with vector alone using techniques commonly known in the art. Antibodies that bind antigen transfected cells, but not vector-only transfected cells, are antigen specific.

[0297] Therapeutic Uses

[0298] The present invention is further directed to antibody-based therapies which involve administering antibodies of the invention to an animal, preferably a mammal, and most preferably a human, patient for treating one or more of the disclosed diseases, disorders, or conditions. Therapeutic compounds of the invention include, but are not limited to, antibodies of the invention (including fragments, analogs and derivatives thereof as described herein) and nucleic acids encoding antibodies of the invention (including fragments, analogs and derivatives thereof and anti-idiotypic antibodies as described herein). The antibodies of the invention can be used to treat, inhibit or prevent diseases, disorders or conditions associated with aberrant expression and/or activity of a polypeptide of the invention, including, but not limited to, any one or more of the diseases, disorders, or conditions described herein. The treatment and/or prevention of diseases, disorders, or conditions associated with aberrant expression and/or activity of a polypeptide of the invention includes, but is not limited to, alleviating symptoms associated with those diseases, disorders or conditions. Antibodies of the invention may be provided in pharmaceutically acceptable compositions as known in the art or as described herein.

[0299] In a specific and preferred embodiment, the present invention is directed to antibody-based therapies which involve administering antibodies of the invention to an animal, preferably a mammal, and most preferably a human, patient for treating one or more diseases, disorders, or conditions, including but not limited to: neural disorders, immune system disorders, muscular disorders, reproductive disorders, gastrointestinal disorders, pulmonary disorders, cardiovascular disorders, renal disorders, proliferative disorders, and/or cancerous diseases and conditions, and/or as described elsewhere herein. Therapeutic compounds of the invention include, but are not limited to, antibodies of the invention (e.g., antibodies directed to the full length protein expressed on the cell surface of a mammalian cell; antibodies directed to an epitope of a polypeptide of the invention (such as, for example, a predicted linear epitope shown in column 7 of Table 1A; or a conformational epitope, including fragments, analogs and derivatives thereof as described herein) and nucleic acids encoding antibodies of the invention (including fragments, analogs and derivatives thereof and anti-idiotypic antibodies as described herein). The antibodies of the invention can be used to treat, inhibit or prevent diseases, disorders or conditions associated with aberrant expression and/or activity of a polypeptide of the invention, including, but not limited to, any one or more of the diseases, disorders, or conditions described herein. The treatment and/or prevention of diseases, disorders, or conditions associated with aberrant expression and/or activity of a polypeptide of the invention includes, but is not limited to, alleviating symptoms associated with those diseases, disorders or conditions. Antibodies of the invention may be provided in pharmaceutically acceptable compositions as known in the art or as described herein.

[0300] A summary of the ways in which the antibodies of the present invention may be used therapeutically includes binding polynucleotides or polypeptides of the present invention locally or systemically in the body or by direct cytotoxicity of the antibody, e.g. as mediated by complement (CDC) or by effector cells (ADCC). Some of these approaches are described in more detail below. Armed with the teachings provided herein, one of ordinary skill in the art will know how to use the antibodies of the present invention for diagnostic, monitoring or therapeutic purposes without undue experimentation.

[0301] The antibodies of this invention may be advantageously utilized in combination with other monoclonal or chimeric antibodies, or with lymphokines or hematopoietic growth factors (such as, e.g., IL-2, IL-3 and IL-7), for example, which serve to increase the number or activity of effector cells which interact with the antibodies.

[0302] The antibodies of the invention may be administered alone or in combination with other types of treatments (e.g., radiation therapy, chemotherapy, hormonal therapy, immunotherapy and anti-tumor agents). Generally, administration of products of a species origin or species reactivity (in the case of antibodies) that is the same species as that of the patient is preferred. Thus, in a preferred embodiment, human antibodies, fragments derivatives, analogs, or nucleic acids, are administered to a human patient for therapy or prophylaxis.

[0303] It is preferred to use high affinity and/or potent in vivo inhibiting and/or neutralizing antibodies against polypeptides or polynucleotides of the present invention, fragments or regions thereof, for both immunoassays directed to and therapy of disorders related to polynucleotides or polypeptides, including fragments thereof, of the present invention. Such antibodies, fragments, or regions, will preferably have an affinity for polynucleotides or polypeptides of the invention, including fragments thereof. Preferred binding affinities include those with a dissociation constant or Kd less than 5×10⁻² M, 10⁻² M, 5×10⁻³ M, 10⁻³ M, 5×10⁻⁴ M, 10⁻⁴ M, 5×10⁻⁵ M, 10⁻⁵ M, 5×10⁻⁶ M, 10⁻⁶ M, 5×10⁻⁷ M, 10⁻⁷ M, 5×10⁻⁸ M, 10⁻⁸ M, 5×10⁻⁹ M, 10⁻⁹ M, 5×10⁻¹⁰ M, 10⁻¹⁰ M, 5×10⁻¹¹ M, 10⁻¹¹ M, 5×10¹² M, 10⁻¹² M, 5×10⁻¹³ M, 10⁻¹³ M, 5×10⁻¹⁴ M, 10⁻¹⁴ M, 5×10⁻¹⁵ M, and 10⁻¹⁵ M.

[0304] Gene Therapy

[0305] In a specific embodiment, nucleic acids comprising sequences encoding antibodies or functional derivatives thereof, are administered to treat, inhibit or prevent a disease or disorder associated with aberrant expression and/or activity of a polypeptide of the invention, by way of gene therapy. Gene therapy refers to therapy performed by the administration to a subject of an expressed or expressible nucleic acid. In this embodiment of the invention, the nucleic acids produce their encoded protein that mediates a therapeutic effect.

[0306] Any of the methods for gene therapy available in the art can be used according to the present invention. Exemplary methods are described below.

[0307] For general reviews of the methods of gene therapy, see Goldspiel et al., Clinical Pharmacy 12:488-505 (1993); Wu and Wu, Biotherapy 3:87-95 (1991); Tolstoshev, Ann. Rev. Pharmacol. Toxicol. 32:573-596 (1993); Mulligan, Science 260:926-932 (1993); and Morgan and Anderson, Ann. Rev. Biochem. 62:191-217 (1993); May, TIBTECH 11(5): 155-215 (1993). Methods commonly known in the art of recombinant DNA technology which can be used are described in Ausubel et al. (eds.), Current Protocols in Molecular Biology, John Wiley & Sons, NY (1993); and Kriegler, Gene Transfer and Expression, A Laboratory Manual, Stockton Press, NY (1990).

[0308] In a preferred embodiment, the compound comprises nucleic acid sequences encoding an antibody, said nucleic acid sequences being part of expression vectors that express the antibody or fragments or chimeric proteins or heavy or light chains thereof in a suitable host. In particular, such nucleic acid sequences have promoters operably linked to the antibody coding region, said promoter being inducible or constitutive, and, optionally, tissue-specific. In another particular embodiment, nucleic acid molecules are used in which the antibody coding sequences and any other desired sequences are flanked by regions that promote homologous recombination at a desired site in the genome, thus providing for intrachromosomal expression of the antibody encoding nucleic acids (Koller and Smithies, Proc. Natl. Acad. Sci. USA 86:8932-8935 (1989); Zijlstra et al., Nature 342:435-438 (1989). In specific embodiments, the expressed antibody molecule is a single chain antibody; alternatively, the nucleic acid sequences include sequences encoding both the heavy and light chains, or fragments thereof, of the antibody.

[0309] Delivery of the nucleic acids into a patient may be either direct, in which case the patient is directly exposed to the nucleic acid or nucleic acid-carrying vectors, or indirect, in which case, cells are first transformed with the nucleic acids in vitro, then transplanted into the patient. These two approaches are known, respectively, as in vivo or ex vivo gene therapy.

[0310] In a specific embodiment, the nucleic acid sequences are directly administered in vivo, where it is expressed to produce the encoded product. This can be accomplished by any of numerous methods known in the art, e.g., by constructing them as part of an appropriate nucleic acid expression vector and administering it so that they become intracellular, e.g., by infection using defective or attenuated retrovirals or other viral vectors (see U.S. Pat. No. 4,980,286), or by direct injection of naked DNA, or by use of microparticle bombardment (e.g., a gene gun; Biolistic, Dupont), or coating with lipids or cell-surface receptors or transfecting agents, encapsulation in liposomes, microparticles, or microcapsules, or by administering them in linkage to a peptide which is known to enter the nucleus, by administering it in linkage to a ligand subject to receptor-mediated endocytosis (see, e.g., Wu and Wu, J. Biol. Chem. 262:4429-4432 (1987)) (which can be used to target cell types specifically expressing the receptors), etc. In another embodiment, nucleic acid-ligand complexes can be formed in which the ligand comprises a fusogenic viral peptide to disrupt endosomes, allowing the nucleic acid to avoid lysosomal degradation. In yet another embodiment, the nucleic acid can be targeted in vivo for cell specific uptake and expression, by targeting a specific -receptor (see, e.g., PCT Publications WO 92/06180; WO 92/22635; WO92/20316; WO93/14188, WO 93/20221). Alternatively, the nucleic acid can be introduced intracellularly and incorporated within host cell DNA for expression, by homologous recombination (Koller and Smithies, Proc. Natl. Acad. Sci. USA 86:8932-8935 (1989); Zijlstra et al., Nature 342:435-438 (1989)).

[0311] In a specific embodiment, viral vectors that contains nucleic acid sequences encoding an antibody of the invention are used. For example, a retroviral vector can be used (see Miller et al., Meth. Enzymol. 217:581-599 (1993)). These retroviral vectors contain the components necessary for the correct packaging of the viral genome and integration into the host cell DNA. The nucleic acid sequences encoding the antibody to be used in gene therapy are cloned into one or more vectors, which facilitates delivery of the gene into a patient. More detail about retroviral vectors can be found in Boesen et al., Biotherapy 6:291-302 (1994), which describes the use of a retroviral vector to deliver the mdr1 gene to hematopoietic stem cells in order to make the stem cells more resistant to chemotherapy. Other references illustrating the use of retroviral vectors in gene therapy are: Clowes et al., J. Clin. Invest. 93:644-651 (1994); Kiem et al., Blood 83:1467-1473 (1994); Salmons and Gunzberg, Human Gene Therapy 4:129-141 (1993); and Grossman and Wilson, Curr. Opin. in Genetics and Devel. 3:110-114 (1993).

[0312] Adenoviruses are other viral vectors that can be used in gene therapy. Adenoviruses are especially attractive vehicles for delivering genes to respiratory epithelia. Adenoviruses naturally infect respiratory epithelia where they cause a mild disease. Other targets for adenovirus-based delivery systems are liver, the central nervous system, endothelial cells, and muscle. Adenoviruses have the advantage of being capable of infecting non-dividing cells. Kozarsky and Wilson, Current Opinion in Genetics and Development 3:499-503 (1993) present a review of adenovirus-based gene therapy. Bout et al., Human Gene Therapy 5:3-10 (1994) demonstrated the use of adenovirus vectors to transfer genes to the respiratory epithelia of rhesus monkeys. Other instances of the use of adenoviruses in gene therapy can be found in Rosenfeld et al., Science 252:431434 (1991); Rosenfeld et al., Cell 68:143-155 (1992); Mastrangeli et al., J. Clin. Invest. 91:225-234 (1993); PCT Publication WO94/12649; and Wang, et al., Gene Therapy 2:775-783 (1995). In a preferred embodiment, adenovirus vectors are used.

[0313] Adeno-associated virus (AAV) has also been proposed for use in gene therapy (Walsh et al., Proc. Soc. Exp. Biol. Med. 204:289-300 (1993); U.S. Pat. No. 5,436,146).

[0314] Another approach to gene therapy involves transferring a gene to cells in tissue culture by such methods as electroporation, lipofection, calcium phosphate mediated transfection, or viral infection. Usually, the method of transfer includes the transfer of a selectable marker to the cells. The cells are then placed under selection to isolate those cells that have taken up and are expressing the transferred gene. Those cells are then delivered to a patient.

[0315] In this embodiment, the nucleic acid is introduced into a cell prior to administration in vivo of the resulting recombinant cell. Such introduction can be carried out by any method known in the art, including but not limited to transfection, electroporation, microinjection, infection with a viral or bacteriophage vector containing the nucleic acid sequences, cell fusion, chromosome-mediated gene transfer, microcell-mediated gene transfer, spheroplast fusion, etc. Numerous techniques are known in the art for the introduction of foreign genes into cells (see, e.g., Loeffler and Behr, Meth. Enzymol. 217:599-618 (1993); Cohen et al., Meth. Enzymol. 217:618-644 (1993); Cline, Pharmac. Ther. 29:69-92m (1985) and may be used in accordance with the present invention, provided that the necessary developmental and physiological functions of the recipient cells are not disrupted. The technique should provide for the stable transfer of the nucleic acid to the cell, so that the nucleic acid is expressible by the cell and preferably heritable and expressible by its cell progeny.

[0316] The resulting recombinant cells can be delivered to a patient by various methods known in the art. Recombinant blood cells (e.g., hematopoietic stem or progenitor cells) are preferably administered intravenously. The amount of cells envisioned for use depends on the desired effect, patient state, etc., and can be determined by one skilled in the art.

[0317] Cells into which a nucleic acid can be introduced for purposes of gene therapy encompass any desired, available cell type, and include but are not limited to epithelial cells, endothelial cells, keratinocytes, fibroblasts, muscle cells, hepatocytes; blood cells such as T lymphocytes, B lymphocytes, monocytes, macrophages, neutrophils, eosinophils, megakaryocytes, granulocytes; various stem or progenitor cells, in particular hematopoietic stem or progenitor cells, e.g., as obtained from bone marrow, umbilical cord blood, peripheral blood, fetal liver, etc.

[0318] In a preferred embodiment, the cell used for gene therapy is autologous to the patient.

[0319] In an embodiment in which recombinant cells are used in gene therapy, nucleic acid sequences encoding an antibody are introduced into the cells such that they are expressible by the cells or their progeny, and the recombinant cells are then administered in vivo for therapeutic effect. In a specific embodiment, stem or progenitor cells are used. Any stem and/or progenitor cells which can be isolated and maintained in vitro can potentially be used in accordance with this embodiment of the present invention (see e.g. PCT Publication WO 94/08598; Stemple and Anderson, Cell 71:973-985 (1992); Rheinwald, Meth. Cell Bio. 21A: 229 (1980); and Pittelkow and Scott, Mayo Clinic Proc. 61:771 (1986)).

[0320] In a specific embodiment, the nucleic acid to be introduced for purposes of gene therapy comprises an inducible promoter operably linked to the coding region, such that expression of the nucleic acid is controllable by the presence or absence of an appropriate inducer of transcription.

[0321] Demonstration of Therapeutic or Prophylactic Activity

[0322] The compounds or pharmaceutical compositions of the invention are preferably tested in vitro, and then in vivo for the desired therapeutic or prophylactic activity, prior to use in humans. For example, in vitro assays to demonstrate the therapeutic or prophylactic utility of a compound or pharmaceutical composition include, the effect of a compound on a cell line or a patient tissue sample. The effect of the compound or composition on the cell line and/or tissue sample can be determined utilizing techniques known to those of skill in the art including, but not limited to, rosette formation assays and cell lysis assays. In accordance with the invention, in vitro assays which can be used to determine whether administration of a specific compound is indicated, include in vitro cell culture assays in which a patient tissue sample is grown in culture, and exposed to or otherwise administered a compound, and the effect of such compound upon the tissue sample is observed.

[0323] Therapeutic/Prophylactic Administration and Composition

[0324] The invention provides methods of treatment, inhibition and prophylaxis by administration to a subject of an effective amount of a compound or pharmaceutical composition of the invention, preferably a polypeptide or antibody of the invention. In a preferred embodiment, the compound is substantially purified (e.g., substantially free from substances that limit its effect or produce undesired side-effects). The subject is preferably an animal, including but not limited to animals such as cows, pigs, horses, chickens, cats, dogs, etc., and is preferably a mammal, and most preferably human.

[0325] Formulations and methods of administration that can be employed when the compound comprises a nucleic acid or an immunoglobulin are described above; additional appropriate formulations and routes of administration can be selected from among those described herein below.

[0326] Various delivery systems are known and can be used to administer a compound of the invention, e.g., encapsulation in liposomes, microparticles, microcapsules, recombinant cells capable of expressing the compound, receptor-mediated endocytosis (see, e.g., Wu and Wu, J. Biol. Chem. 262:4429-4432 (1987)), construction of a nucleic acid as part of a retroviral or other vector, etc. Methods of introduction include but are not limited to intradermal, intramuscular, intraperitoneal, intravenous, subcutaneous, intranasal, epidural, and oral routes. The compounds or compositions may be administered by any convenient route, for example by infusion or bolus injection, by absorption through epithelial or mucocutaneous linings (e.g., oral mucosa, rectal and intestinal mucosa, etc.) and may be administered together with other biologically active agents. Administration can be systemic or local. In addition, it may be desirable to introduce the pharmaceutical compounds or compositions of the invention into the central nervous system by any suitable route, including intraventricular and intrathecal injection; intraventricular injection may be facilitated by an intraventricular catheter, for example, attached to a reservoir, such as an Ommaya reservoir. Pulmonary administration can also be employed, e.g., by use of an inhaler or nebulizer, and formulation with an aerosolizing agent.

[0327] In a specific embodiment, it may be desirable to administer the pharmaceutical compounds or compositions of the invention locally to the area in need of treatment; this may be achieved by, for example, and not by way of limitation, local infusion during surgery, topical application, e.g., in conjunction with a wound dressing after surgery, by injection, by means of a catheter, by means of a suppository, or by means of an implant, said implant being of a porous, non-porous, or gelatinous material, including membranes, such as sialastic membranes, or fibers. Preferably, when administering a protein, including an antibody, of the invention, care must be taken to use materials to which the protein does not absorb.

[0328] In another embodiment, the compound or composition can be delivered in a vesicle, in particular a liposome (see Langer, Science 249:1527-1533 (1990); Treat et al., in Liposomes in the Therapy of Infectious Disease and Cancer, Lopez-Berestein and Fidler (eds.), Liss, New York, pp. 353-365 (1989); Lopez-Berestein, ibid., pp. 317-327; see generally ibid.)

[0329] In yet another embodiment, the compound or composition can be delivered in a controlled release system. In one embodiment, a pump may be used (see Langer, supra; Sefton, CRC Crit. Ref. Biomed. Eng. 14:201 (1987); Buchwald et al., Surgery 88:507 (1980); Saudek et al., N. Engl. J. Med. 321:574 (1989)). In another embodiment, polymeric materials can be used (see Medical Applications of Controlled Release, Langer and Wise (eds.), CRC Pres., Boca Raton, Florida (1974); Controlled Drug Bioavailability, Drug Product Design and Performance, Smolen and Ball (eds.), Wiley, New York (1984); Ranger and Peppas, J., Macromol. Sci. Rev. Macromol. Chem. 23:61 (1983); see also Levy et al., Science 228:190 (1985); During et al., Ann. Neurol. 25:351 (1989); Howard et al., J.Neurosurg. 71:105 (1989)). In yet another embodiment, a controlled release system can be placed in proximity of the therapeutic target, e.g., the brain, thus requiring only a fraction of the systemic dose (see, e.g., Goodson, in Medical Applications of Controlled Release, supra, vol. 2, pp. 115-138 (1984)).

[0330] Other controlled release systems are discussed in the review by Langer (Science 249:1527-1533 (1990)).

[0331] In a specific embodiment where the compound of the invention is a nucleic acid encoding a protein, the nucleic acid can be administered in vivo to promote expression of its encoded protein, by constructing it as part of an appropriate nucleic acid expression vector and administering it so that it becomes intracellular, e.g., by use of a retroviral vector (see U.S. Pat. No. 4,980,286), or by direct injection, or by use of microparticle bombardment (e.g., a gene gun; Biolistic, Dupont), or coating with lipids or cell-surface receptors or transfecting agents, or by administering it in linkage to a homeobox-like peptide which is known to enter the nucleus (see e.g., Joliot et al., Proc. Natl. Acad. Sci. USA 88:1864-1868 (1991)), etc. Alternatively, a nucleic acid can be introduced intracellularly and incorporated within host cell DNA for expression, by homologous recombination.

[0332] The present invention also provides pharmaceutical compositions. Such compositions comprise a therapeutically effective amount of a compound, and a pharmaceutically acceptable carrier. In a specific embodiment, the term “pharmaceutically acceptable” means approved by a regulatory agency of the Federal or a state government or listed in the U.S. Pharmacopeia or other generally recognized pharmacopeia for use in animals, and more particularly in humans. The term “carrier” refers to a diluent, adjuvant, excipient, or vehicle with which the therapeutic is administered. Such pharmaceutical carriers can be sterile liquids, such as water and oils, including those of petroleum, animal, vegetable or synthetic origin, such as peanut oil, soybean oil, mineral oil, sesame oil and the like. Water is a preferred carrier when the pharmaceutical composition is administered intravenously. Saline solutions and aqueous dextrose and glycerol solutions can also be employed as liquid carriers, particularly for injectable solutions. Suitable pharmaceutical excipients include starch, glucose, lactose, sucrose, gelatin, malt, rice, flour, chalk, silica gel, sodium stearate, glycerol monostearate, talc, sodium chloride, dried skim milk, glycerol, propylene, glycol, water, ethanol and the like. The composition, if desired, can also contain minor amounts of wetting or emulsifying agents, or pH buffering agents. These compositions can take the form of solutions, suspensions, emulsion, tablets, pills, capsules, powders, sustained-release formulations and the like. The composition can be formulated as a suppository, with traditional binders and carriers such as triglycerides. Oral formulation can include standard carriers such as pharmaceutical grades of mannitol, lactose, starch, magnesium stearate, sodium saccharine, cellulose, magnesium carbonate, etc. Examples of suitable pharmaceutical carriers are described in “Remington's Pharmaceutical Sciences” by E. W. Martin. Such compositions will contain a therapeutically effective amount of the compound, preferably in purified form, together with a suitable amount of carrier so as to provide the form for proper administration to the patient. The formulation should suit the mode of administration.

[0333] In a preferred embodiment, the composition is formulated in accordance with routine procedures as a pharmaceutical composition adapted for intravenous administration to human beings. Typically, compositions for intravenous administration are solutions in sterile isotonic aqueous buffer. Where necessary, the composition may also include a solubilizing agent and a local anesthetic such as lignocaine to ease pain at the site of the injection. Generally, the ingredients are supplied either separately or mixed together in unit dosage form, for example, as a dry lyophilized powder or water free concentrate in a hermetically sealed container such as an ampoule or sachette indicating the quantity of active agent. Where the composition is to be administered by infusion, it can be dispensed with an infusion bottle containing sterile pharmaceutical grade water or saline. Where the composition is administered by injection, an ampoule of sterile water for injection or saline can be provided so that the ingredients may be mixed prior to administration.

[0334] The compounds of the invention can be formulated as neutral or salt forms. Pharmaceutically acceptable salts include those formed with anions such as those derived from hydrochloric, phosphoric, acetic, oxalic, tartaric acids, etc., and those formed with cations such as those derived from sodium, potassium, ammonium, calcium, ferric hydroxides, isopropylamine, triethylamine, 2-ethylamino ethanol, histidine, procaine, etc.

[0335] The amount of the compound of the invention which will be effective in the treatment, inhibition and prevention of a disease or disorder associated with aberrant expression and/or activity of a polypeptide of the invention can be determined by standard clinical techniques. In addition, in vitro assays may optionally be employed to help identify optimal dosage ranges. The precise dose to be employed in the formulation will also depend on the route of administration, and the seriousness of the disease or disorder, and should be decided according to the judgment of the practitioner and each patient's circumstances. Effective doses may be extrapolated from dose-response curves derived from in vitro or animal model test systems.

[0336] For antibodies, the dosage administered to a patient is typically 0.1 mg/kg to 100 mg/kg of the patient's body weight. Preferably, the dosage administered to a patient is between 0.1 mg/kg and 20 mg/kg of the patient's body weight, more preferably 1 mg/kg to 10 mg/kg of the patient's body weight. Generally, human antibodies have a longer half-life within the human body than antibodies from other species due to the immune response to the foreign polypeptides. Thus, lower dosages of human antibodies and less frequent administration is often possible. Further, the dosage and frequency of administration of antibodies of the invention may be reduced by enhancing uptake and tissue penetration (e.g., into the brain) of the antibodies by modifications such as, for example, lipidation.

[0337] The invention also provides a pharmaceutical pack or kit comprising one or more containers filled with one or more of the ingredients of the pharmaceutical compositions of the invention. Optionally associated with such container(s) can be a notice in the form prescribed by a governmental agency regulating the manufacture, use or sale of pharmaceuticals or biological products, which notice reflects approval by the agency of manufacture, use or sale for human administration.

[0338] Diagnosis and Imaging

[0339] Labeled antibodies, and derivatives and analogs thereof, which specifically bind to a polypeptide of interest can be used for diagnostic purposes to detect, diagnose, or monitor diseases, disorders, and/or conditions associated with the aberrant expression and/or activity of a polypeptide of the invention. The invention provides for the detection of aberrant expression of a polypeptide of interest, comprising (a) assaying the expression of the polypeptide of interest in cells or body fluid of an individual using one or more antibodies specific to the polypeptide interest and (b) comparing the level of gene expression with a standard gene expression level, whereby an increase or decrease in the assayed polypeptide gene expression level compared to the standard expression level is indicative of aberrant expression.

[0340] The invention provides a diagnostic assay for diagnosing a disorder, comprising (a) assaying the expression of the polypeptide of interest in cells or body fluid of an individual using one or more antibodies specific to the polypeptide interest and (b) comparing the level of gene expression with a standard gene expression level, whereby an increase or decrease in the assayed polypeptide gene expression level compared to the standard expression level is indicative of a particular disorder. With respect to cancer, the presence of a relatively high amount of transcript in biopsied tissue from an individual may indicate a predisposition for the development of the disease, or may provide a means for detecting the disease prior to the appearance of actual clinical symptoms. A more definitive diagnosis of this type may allow health professionals to employ preventative measures or aggressive treatment earlier thereby preventing the development or further progression of the cancer.

[0341] Antibodies of the invention can be used to assay protein levels in a biological sample using classical immunohistological methods known to those of skill in the art (e.g., see Jalkanen et al., J. Cell. Biol. 101:976-985 (1985); Jalkanen et al., J. Cell. Biol. 105:3087-3096 (1987)). Other antibody-based methods useful for detecting protein gene expression include immunoassays, such as the enzyme linked immunosorbent assay (ELISA) and the radioimmunoassay (RIA). Suitable antibody assay labels are known in the art and include enzyme labels, such as, glucose oxidase; radioisotopes, such as iodine (125I, 121I), carbon (14C), sulfur (35S), tritium (3H), indium (112In), and technetium (99Tc); luminescent labels, such as luminol; and fluorescent labels, such as fluorescein and rhodamine, and biotin.

[0342] One facet of the invention is the detection and diagnosis of a disease or disorder associated with aberrant expression of a polypeptide of interest in an animal, preferably a mammal and most preferably a human. In one embodiment, diagnosis comprises: a) administering (for example, parenterally, subcutaneously, or intraperitoneally) to a subject an effective amount of a labeled molecule which specifically binds to the polypeptide of interest; b) waiting for a time interval following the administering for permitting the labeled molecule to preferentially concentrate at sites in the subject where the polypeptide is expressed (and for unbound labeled molecule to be cleared to background level); c) determining background level; and d) detecting the labeled molecule in the subject, such that detection of labeled molecule above the background level indicates that the subject has a particular disease or disorder associated with aberrant expression of the polypeptide of interest. Background level can be determined by various methods including, comparing the amount of labeled molecule detected to a standard value previously determined for a particular system.

[0343] It will be understood in the art that the size of the subject and the imaging system used will determine the quantity of imaging moiety needed to produce diagnostic images. In the case of a radioisotope moiety, for a human subject, the quantity of radioactivity injected will normally range from about 5 to 20 millicuries of 99mTc. The labeled antibody or antibody fragment will then preferentially accumulate at the location of cells which contain the specific protein. In vivo tumor imaging is described in S. W. Burchiel et al., “Immunopharmacokinetics of Radiolabeled Antibodies and Their Fragments.” (Chapter 13 in Tumor Imaging: The Radiochemical Detection of Cancer, S. W. Burchiel and B. A. Rhodes, eds., Masson Publishing Inc. (1982)).

[0344] Depending on several variables, including the type of label used and the mode of administration, the time interval following the administration for permitting the labeled molecule to preferentially concentrate at sites in the subject and for unbound labeled molecule to be cleared to background level is 6 to 48 hours or 6 to 24 hours or 6 to 12 hours. In another embodiment the time interval following administration is 5 to 20 days or 5 to 10 days.

[0345] In an embodiment, monitoring of the disease or disorder is carried out by repeating the method for diagnosing the disease or disease, for example, one month after initial diagnosis, six months after initial diagnosis, one year after initial diagnosis, etc.

[0346] Presence of the labeled molecule can be detected in the patient using methods known in the art for in vivo scanning. These methods depend upon the type of label used. Skilled artisans will be able to determine the appropriate method for detecting a particular label. Methods and devices that may be used in the diagnostic methods of the invention include, but are not limited to, computed tomography (CT), whole body scan such as position emission tomography (PET), magnetic resonance imaging (MRI), and sonography.

[0347] In a specific embodiment, the molecule is labeled with a radioisotope and is detected in the patient using a radiation responsive surgical instrument (Thurston et al., U.S. Pat. No. 5,441,050). In another embodiment, the molecule is labeled with a fluorescent compound and is detected in the patient using a fluorescence responsive scanning instrument. In another embodiment, the molecule is labeled with a positron emitting metal and is detected in the patent using positron emission-tomography. In yet another embodiment, the molecule is labeled with a paramagnetic label and is detected in a patient using magnetic resonance imaging (MRI).

[0348] Kits

[0349] The present invention provides kits that can be used in the above methods. In one embodiment, a kit comprises an antibody of the invention, preferably a purified antibody, in one or more containers. In a specific embodiment, the kits of the present invention contain a substantially isolated polypeptide comprising an epitope which is specifically immunoreactive with an antibody included in the kit. Preferably, the kits of the present invention further comprise a control antibody which does not react with the polypeptide of interest. In another specific embodiment, the kits of the present invention contain a means for detecting the binding of an antibody to a polypeptide of interest (e.g., the antibody may be conjugated to a detectable substrate such as a fluorescent compound, an enzymatic substrate, a radioactive compound or a luminescent compound, or a second antibody which recognizes the first antibody may be conjugated to a detectable substrate).

[0350] In another specific embodiment of the present invention, the kit is a diagnostic kit for use in screening serum containing antibodies specific against proliferative and/or cancerous polynucleotides and polypeptides. Such a kit may include a control antibody that does not react with the polypeptide of interest. Such a kit may include a substantially isolated polypeptide antigen comprising an epitope which is specifically immunoreactive with at least one anti-polypeptide antigen antibody. Further, such a kit includes means for detecting the binding of said antibody to the antigen (e.g., the antibody may be conjugated to a fluorescent compound such as fluorescein or rhodamine which can be detected by flow cytometry). In specific embodiments, the kit may include a recombinantly produced or chemically synthesized polypeptide antigen. The polypeptide antigen of the kit may also be attached to a solid support.

[0351] In a more specific embodiment the detecting means of the above-described kit includes a solid support to which said polypeptide antigen is attached. Such a kit may also include a non-attached reporter-labeled anti-human antibody. In this embodiment, binding of the antibody to the polypeptide antigen can be detected by binding of the said reporter-labeled antibody.

[0352] In an additional embodiment, the invention includes a diagnostic kit for use in screening serum containing antigens of the polypeptide of the invention. The diagnostic kit includes a substantially isolated antibody specifically immunoreactive with polypeptide or polynucleotide antigens, and means for detecting the binding of the polynucleotide or polypeptide antigen to the antibody. In one embodiment, the antibody is attached to a solid support. In a specific embodiment, the antibody may be a monoclonal antibody. The detecting means of the kit may include a second, labeled monoclonal antibody. Alternatively, or in addition, the detecting means may include a labeled, competing antigen.

[0353] In one diagnostic configuration, test serum is reacted with a solid phase reagent having a surface-bound antigen obtained by the methods of the present invention. After binding with specific antigen antibody to the reagent and removing unbound serum components by washing, the reagent is reacted with reporter-labeled anti-human antibody to bind reporter to the reagent in proportion to the amount of bound anti-antigen antibody on the solid support. The reagent is again washed to remove unbound labeled antibody, and the amount of reporter associated with the reagent is determined. Typically, the reporter is an enzyme which is detected by incubating the solid phase in the presence of a suitable fluorometric, luminescent or calorimetric substrate (Sigma, St. Louis, Mo.).

[0354] The solid surface reagent in the above assay is prepared by known techniques for attaching protein material to solid support material, such as polymeric beads, dip sticks, 96-well plate or filter material. These attachment methods generally include non-specific adsorption of the protein to the support or covalent attachment of the protein, typically through a free amine group, to a chemically reactive group on the solid support, such as an activated carboxyl, hydroxyl, or aldehyde group. Alternatively, streptavidin coated plates can be used in conjunction with biotinylated antigen(s).

[0355] Thus, the invention provides an assay system or kit for carrying out this diagnostic method. The kit generally includes a support with surface-bound recombinant antigens, and a reporter-labeled anti-human antibody for detecting surface-bound anti-antigen antibody.

[0356] Uses of the Polynucleotides

[0357] Each of the polynucleotides identified herein can be used in numerous ways as reagents. The following description should be considered exemplary and utilizes known techniques.

[0358] The polynucleotides of the present invention are useful for chromosome identification. There exists an ongoing need to identify new chromosome markers, since few chromosome marking reagents, based on actual sequence data (repeat polymorphisms), are presently available. Each sequence is specifically targeted to and can hybridize with a particular location on an individual human chromosome, thus each polynucleotide of the present invention can routinely be used as a chromosome marker using techniques known in the art. Table 1A, column 9 provides the chromosome location of some of the polynucleotides of the invention.

[0359] Briefly, sequences can be mapped to chromosomes by preparing PCR primers (preferably at least 15 bp (e.g., 15-25 bp) from the sequences shown in SEQ ID NO:X. Primers can optionally be selected using computer analysis so that primers do not span more than one predicted exon in the genomic DNA. These primers are then used for PCR screening of somatic cell hybrids containing individual human chromosomes. Only those hybrids containing the human gene corresponding to SEQ ID NO:X will yield an amplified fragment.

[0360] Similarly, somatic hybrids provide a rapid method of PCR mapping the polynucleotides to particular chromosomes. Three or more clones can be assigned per day using a single thermal cycler. Moreover, sublocalization of the polynucleotides can be achieved with panels of specific chromosome fragments. Other gene mapping strategies that can be used include in situ hybridization, prescreening with labeled flow-sorted chromosomes, preselection by hybridization to construct chromosome specific-cDNA libraries, and computer mapping techniques (See, e.g., Shuler, Trends-Biotechnol 16:456-459 (1998) which is hereby incorporated by reference in its entirety).

[0361] Precise chromosomal location of the polynucleotides can also be achieved using fluorescence in situ hybridization (FISH) of a metaphase chromosomal spread. This technique uses polynucleotides as short as 500 or 600 bases; however, polynucleotides 2,000-4,000 bp are preferred. For a review of this technique, see Verma et al., “Human Chromosomes: a Manual of Basic Techniques,” Pergamon Press, New York (1988).

[0362] For chromosome mapping, the polynucleotides can be used individually (to mark a single chromosome or a single site on that chromosome) or in panels (for marking multiple sites and/or multiple chromosomes).

[0363] Thus, the present invention also provides a method for chromosomal localization which involves (a) preparing PCR primers from the polynucleotide sequences in Table 1A and/or Table 2 and SEQ ID NO:X and (b) screening somatic cell hybrids containing individual chromosomes.

[0364] The polynucleotides of the present invention would likewise be useful for radiation hybrid mapping, HAPPY mapping, and long range restriction mapping. For a review of these techniques and others known in the art, see, e.g. Dear, “Genome Mapping: A Practical Approach,” IRL Press at Oxford University Press, London (1997); Aydin, J. Mol. Med. 77:691-694 (1999); Hacia et al., Mol. Psychiatry 3:483-492 (1998); Herrick et al., Chromosome Res. 7:409-423 (1999); Hamilton et al., Methods Cell Biol. 62:265-280 (2000); and/or Ott, J. Hered. 90:68-70 (1999) each of which is hereby incorporated by reference in its entirety.

[0365] Once a polynucleotide has been mapped to a precise chromosomal location, the physical position of the polynucleotide can be used in linkage analysis. Linkage analysis establishes coinheritance between a chromosomal location and presentation of a particular disease. (Disease mapping data are found, for example, in V. McKusick, Mendelian Inheritance in Man (available on line through Johns Hopkins University Welch Medical Library)). Column 10 of Table 1A provides an OMIM reference identification number of diseases associated with the cytologic band disclosed in column 9 of Table 1A, as determined using techniques described herein and by reference to Table 5. Assuming 1 megabase mapping resolution and one gene per 20 kb, a cDNA precisely localized to a chromosomal region associated with the disease could be one of 50-500 potential causative genes.

[0366] Thus, once coinheritance is established, differences in a polynucleotide of the invention and the corresponding gene between affected and unaffected individuals can be examined. First, visible structural alterations in the chromosomes, such as deletions or translocations, are examined in chromosome spreads or by PCR. If no structural alterations exist, the presence of point mutations are ascertained. Mutations observed in some or all affected individuals, but not in normal individuals, indicates that the mutation may cause the disease. However, complete sequencing of the polypeptide and the corresponding gene from several normal individuals is required to distinguish the mutation from a polymorphism. If a new polymorphism is identified, this polymorphic polypeptide can be used for further linkage analysis.

[0367] Furthermore, increased or decreased expression of the gene in affected individuals as compared to unaffected individuals can be assessed using the polynucleotides of the invention. Any of these alterations (altered expression, chromosomal rearrangement, or mutation) can be used as a diagnostic or prognostic marker. Diagnostic and prognostic methods, kits and reagents encompassed by the present invention are briefly described below and more thoroughly elsewhere herein (see e.g., the sections labeled “Antibodies”, “Diagnostic Assays”, and “Methods for Detecting Diseases”).

[0368] Thus, the invention also provides a diagnostic method useful during diagnosis of a disorder, involving measuring the expression level of polynucleotides of the present invention in cells or body fluid from an individual and comparing the measured gene expression level with a standard level of polynucleotide expression level, whereby an increase or decrease in the gene expression level compared to the standard is indicative of a disorder. Additional non-limiting examples of diagnostic methods encompassed by the present invention are more thoroughly described elsewhere herein (see, e.g., Example 12).

[0369] In still another embodiment, the invention includes a kit for analyzing samples for the presence of proliferative and/or cancerous polynucleotides derived from a test subject. In a general embodiment, the kit includes at least one polynucleotide probe containing a nucleotide sequence that will specifically hybridize with a polynucleotide of the invention and a suitable container. In a specific embodiment, the kit includes two polynucleotide probes defining an internal region of the polynucleotide of the invention, where each probe has one strand containing a 31 ′mer-end internal to the region. In a further embodiment, the probes may be useful as primers for polymerase chain reaction amplification.

[0370] Where a diagnosis of a related disorder, including, for example, diagnosis of a tumor, has already been made according to conventional methods, the present invention is useful as a prognostic indicator, whereby patients exhibiting enhanced or depressed polynucleotide of the invention expression will experience a worse clinical outcome relative to patients expressing the gene at a level nearer the standard level.

[0371] By “measuring the expression level of polynucleotides of the invention” is intended qualitatively or quantitatively measuring or estimating the level of the polypeptide of the invention or the level of the mRNA encoding the polypeptide of the invention in a first biological sample either directly (e.g., by determining or estimating absolute protein level or mRNA level) or relatively (e.g., by comparing to the polypeptide level or mRNA level in a second biological sample). Preferably, the polypeptide level or mRNA level in the first biological sample is measured or estimated and compared to a standard polypeptide level or mRNA level, the standard being taken from a second biological sample obtained from an individual not having the related disorder or being determined by averaging levels from a population of individuals not having a related disorder. As will be appreciated in the art, once a standard polypeptide level or mRNA level is known, it can be used repeatedly as a standard for comparison.

[0372] By “biological sample” is intended any biological sample obtained from an individual, body fluid, cell line, tissue culture, or other source which contains polypeptide of the present invention or the corresponding mRNA. As indicated, biological samples include body fluids (such as semen, lymph, vaginal pool, sera, plasma, urine, synovial fluid and spinal fluid) which contain the polypeptide of the present invention, and tissue sources found to express the polypeptide of the present invention. Methods for obtaining tissue biopsies and body fluids from mammals are well known in the art. Where the biological sample is to include mRNA, a tissue biopsy is the preferred source.

[0373] The method(s) provided above may preferably be applied in a diagnostic method and/or kits in which polynucleotides and/or polypeptides of the invention are attached to a solid support. In one exemplary method, the support may be a “gene chip” or a “biological chip” as described in U.S. Pat. Nos. 5,837,832, 5,874,219, and 5,856,174. Further, such a gene chip with polynucleotides of the invention attached may be used to identify polymorphisms between the isolated polynucleotide sequences of the invention, with polynucleotides isolated from a test subject. The knowledge of such polymorphisms (i.e. their location, as well as, their existence) would be beneficial in identifying disease loci for many disorders, such as for example, in neural disorders, immune system disorders, muscular disorders, reproductive disorders, gastrointestinal disorders, pulmonary disorders, digestive disorders, metabolic disorders, cardiovascular disorders, renal disorders, proliferative disorders, and/or cancerous diseases and conditions. Such a method is described in U.S. Pat. Nos. 5,858,659 and 5,856,104. The US patents referenced supra are hereby incorporated by reference in their entirety herein.

[0374] The present invention encompasses polynucleotides of the present invention that are chemically synthesized, or reproduced as peptide nucleic acids (PNA), or according to other methods known in the art. The use of PNAs would serve as the preferred form if the polynucleotides of the invention are incorporated onto a solid support, or gene chip. For the purposes of the present invention, a peptide nucleic acid (PNA) is a polyamide type of DNA analog and the monomeric units for adenine, guanine, thymine and cytosine are available commercially (Perceptive Biosystems). Certain components of DNA, such as phosphorus, phosphorus oxides, or deoxyribose derivatives, are not present in PNAs. As disclosed by Nielsen et al., Science 254, 1497 (1991); and Egholm et al., Nature 365, 666 (1993), PNAs bind specifically and tightly to complementary DNA strands and are not degraded by nucleases. In fact, PNA binds more strongly to DNA than DNA itself does. This is probably because there is no electrostatic repulsion between the two strands, and also the polyamide backbone is more flexible. Because of this, PNA/DNA duplexes bind under a wider range of stringency conditions than DNA/DNA duplexes, making it easier to perform multiplex hybridization. Smaller probes can be used than with DNA due to the strong binding. In addition, it is more likely that single base mismatches can be determined with PNA/DNA hybridization because a single mismatch in a PNA/DNA 15-mer lowers the melting point (T.sub.m) by 8°-20° C., vs. 4°-16° C. for the DNA/DNA 15-mer duplex. Also, the absence of charge groups in PNA means that hybridization can be done at low ionic strengths and reduce possible interference by salt during the analysis.

[0375] The compounds of the present invention have uses which include, but are not limited to, detecting cancer in mammals. In particular the invention is useful during diagnosis of pathological cell proliferative neoplasias which include, but are not limited to: acute myelogenous leukemias including acute monocytic leukemia, acute myeloblastic leukemia, acute promyelocytic leukemia, acute myelomonocytic leukemia, acute erythroleukemia, acute megakaryocytic leukemia, and acute undifferentiated leukemia, etc.; and chronic myelogenous leukemias including chronic myelomonocytic leukemia, chronic granulocytic leukemia, etc. Preferred mammals include monkeys, apes, cats, dogs, cows, pigs, horses, rabbits and humans. Particularly preferred are humans.

[0376] Pathological cell proliferative disorders are often associated with inappropriate activation of proto-oncogenes. (Gelmann, E. P. et al., “The Etiology of Acute Leukemia: Molecular Genetics and Viral Oncology,” in Neoplastic Diseases of the Blood, Vol 1., Wiemik, P. H. et al. eds., 161-182 (1985)). Neoplasias are now believed to result from the qualitative alteration of a normal cellular gene product, or from the quantitative modification of gene expression by insertion into the chromosome of a viral sequence, by chromosomal translocation of a gene to a more actively transcribed region, or by some other mechanism. (Gelmann et al., supra) It is likely that mutated or altered expression of specific genes is involved in the pathogenesis of some leukemias, among other tissues and cell types. (Gelmann et al., supra) Indeed, the human counterparts of the oncogenes involved in some animal neoplasias have been amplified or translocated in some cases of human leukemia and carcinoma. (Gelmann et al., supra)

[0377] For example, c-myc expression is highly amplified in the non-lymphocytic leukemia cell line HL-60. When HL-60 cells are chemically induced to stop proliferation, the level of c-myc is found to be downregulated. (International Publication Number WO 91/15580). However, it has been shown that exposure of HIL-60 cells to a DNA construct that is complementary to the 5′ end of c-myc or c-myb blocks translation of the corresponding mRNAs which downregulates expression of the c-myc or c-myb proteins and causes arrest of cell proliferation and differentiation of the treated cells. (International Publication Number WO 91/15580; Wickstrom et al., Proc. Natl. Acad. Sci. 85:1028 (1988); Anfossi et al., Proc. Natl. Acad. Sci. 86:3379 (1989)). However, the skilled artisan would appreciate the present invention's usefulness is not be limited to treatment, prevention, and/or prognosis of proliferative disorders of cells and tissues of hematopoietic origin, in light of the numerous cells and cell types of varying origins which are known to exhibit proliferative phenotypes.

[0378] In addition to the foregoing, a polynucleotide of the present invention can be used to control gene expression through triple helix formation or through antisense DNA or RNA. Antisense techniques are discussed, for example, in Okano, J. Neurochem. 56: 560 (1991); “Oligodeoxynucleotides as Antisense Inhibitors of Gene Expression, CRC Press, Boca Raton, Fla. (1988). Triple helix formation is discussed in, for instance Lee et al., Nucleic Acids Research 6: 3073 (1979); Cooney et al., Science 241: 456 (1988); and Dervan et al., Science 251: 1360 (1991). Both methods rely on binding of the polynucleotide to a complementary DNA or RNA. For these techniques, preferred polynucleotides are usually oligonucleotides 20 to 40 bases in length and complementary to either the region of the gene involved in transcription (triple helix—see Lee et al., Nucl. Acids Res. 6:3073 (1979); Cooney et al., Science 241:456 (1988); and Dervan et al., Science 251:1360 (1991)) or to the mRNA itself (antisense—Okano, J. Neurochem. 56:560 (1991); Oligodeoxy-nucleotides as Antisense Inhibitors of Gene Expression, CRC Press, Boca Raton, Fla. (1988)). Triple helix formation optimally results in a shut-off of RNA transcription from DNA, while antisense RNA hybridization blocks translation of an mRNA molecule into polypeptide. The oligonucleotide described above can also be delivered to cells such that the antisense RNA or DNA may be expressed in vivo to inhibit production of polypeptide of the present invention antigens. Both techniques are effective in model systems, and the information disclosed herein can be used to design antisense or triple helix polynucleotides in an effort to treat disease, and in particular, for the treatment of proliferative diseases and/or conditions. Non-limiting antisense and triple helix methods encompassed by the present invention are more thoroughly described elsewhere herein (see, e.g., the section labeled “Antisense and Ribozyme (Antagonists)”).

[0379] Polynucleotides of the present invention are also useful in gene therapy. One goal of gene therapy is to insert a normal gene into an organism having a defective gene, in an effort to correct the genetic defect. The polynucleotides disclosed in the present invention offer a means of targeting such genetic defects in a highly accurate manner. Another goal is to insert a new gene that was not present in the host genome, thereby producing a new trait in the host cell. Additional non-limiting examples of gene therapy methods encompassed by the present invention are more thoroughly described elsewhere herein (see, e.g., the sections labeled “Gene Therapy Methods”, and Examples 16, 17 and 18).

[0380] The polynucleotides are also useful for identifying individuals from minute biological samples. The United States military, for example, is considering the use of restriction fragment length polymorphism (RFLP) for identification of its personnel. In this technique, an individual's genomic DNA is digested with one or more restriction enzymes, and probed on a Southern blot to yield unique bands for identifying personnel. This method does not suffer from the current limitations of “Dog Tags” which can be lost, switched, or stolen, making positive identification difficult. The polynucleotides of the present invention can be used as additional DNA markers for RFLP.

[0381] The polynucleotides of the present invention can also be used as an alternative to RFLP, by determining the actual base-by-base DNA sequence of selected portions of an individual's genome. These sequences can be used to prepare PCR primers for amplifying and isolating such selected DNA, which can then be sequenced. Using this technique, individuals can be identified because each individual will have a unique set of DNA sequences. Once an unique ID database is established for an individual, positive identification of that individual, living or dead, can be made from extremely small tissue samples.

[0382] Forensic biology also benefits from using DNA-based identification techniques as disclosed herein. DNA sequences taken from very small biological samples such as tissues, e.g., hair or skin, or body fluids, e.g., blood, saliva, semen, synovial fluid, amniotic fluid, breast milk, lymph, pulmonary sputum or surfactant, urine, fecal matter, etc., can be amplified using PCR. In one prior art technique, gene sequences amplified from polymorphic loci, such as DQa class II HLA gene, are used in forensic biology to identify individuals. (Erlich, H., PCR Technology, Freeman and Co. (1992)). Once these specific polymorphic loci are amplified, they are digested with one or more restriction enzymes, yielding an identifying set of bands on a Southern blot probed with DNA corresponding to the DQa class II HLA gene. Similarly, polynucleotides of the present invention can be used as polymorphic markers for forensic purposes.

[0383] There is also a need for reagents capable of identifying the source of a particular tissue. Such need arises, for example, in forensics when presented with tissue of unknown origin. Appropriate reagents can comprise, for example, DNA probes or primers prepared from the sequences of the present invention, specific to tissues, including but not limited to those shown in Table 1A. Panels of such reagents can identify tissue by species and/or by organ type. In a similar fashion, these reagents can be used to screen tissue cultures for contamination. Additional non-limiting examples of such uses are further described herein.

[0384] The polynucleotides of the present invention are also useful as hybridization probes for differential identification of the tissue(s) or cell type(s) present in a biological sample. Similarly, polypeptides and antibodies directed to polypeptides of the present invention are useful to provide immunological probes for differential identification of the tissue(s) (e.g., immunohistochemistry assays) or cell type(s) (e.g., immunocytochemistry assays). In addition, for a number of disorders of the above tissues or cells, significantly higher or lower levels of gene expression of the polynucleotides/polypeptides of the present invention may be detected in certain tissues (e.g., tissues expressing polypeptides and/or polynucleotides of the present invention, for example, those disclosed in column 8 of Table 1A, and/or cancerous and/or wounded tissues) or bodily fluids (e.g., semen, lymph, vaginal pool, serum, plasma, urine, synovial fluid or spinal fluid) taken from an individual having such a disorder, relative to a “standard” gene expression level, i.e., the expression level in healthy tissue from an individual not having the disorder.

[0385] Thus, the invention provides a diagnostic method of a disorder, which involves: (a) assaying gene expression level in cells or body fluid of an individual; (b) comparing the gene expression level with a standard gene expression level, whereby an increase or decrease in the assayed gene expression level compared to the standard expression level is indicative of a disorder.

[0386] In the very least, the polynucleotides of the present invention can be used as molecular weight markers on Southern gels, as diagnostic probes for the presence of a specific mRNA in a particular cell type, as a probe to “subtract-out” known sequences in the process of discovering novel polynucleotides, for selecting and making oligomers for attachment to a “gene chip” or other support, to raise anti-DNA antibodies using DNA immunization techniques, and as an antigen to elicit an immune response.

[0387] Uses of the Polypeptides

[0388] Each of the polypeptides identified herein can be used in numerous ways. The following description should be considered exemplary and utilizes known techniques.

[0389] Polypeptides and antibodies directed to polypeptides of the present invention are useful to provide immunological probes for differential identification of the tissue(s) (e.g., immunohistochemistry assays such as, for example, ABC immunoperoxidase (Hsu et al., J. Histochem. Cytochem. 29:577-580 (1981)) or cell type(s) (e.g., immunocytochemistry assays).

[0390] Antibodies can be used to assay levels of polypeptides encoded by polynucleotides of the invention in a biological sample using classical immunohistological methods known to those of skill in the art (e.g., see Jalkanen, et al., J. Cell. Biol. 101:976-985 (1985); Jalkanen, et al., J. Cell. Biol. 105:3087-3096 (1987)). Other antibody-based methods useful for detecting protein gene expression include immunoassays, such as the enzyme linked immunosorbent assay (ELISA) and the radioimmunoassay (RIA). Suitable antibody assay labels are known in the art and include enzyme labels, such as, glucose oxidase; radioisotopes, such as iodine (¹³¹I, ¹²⁵I, ¹²³I, ¹²¹I), carbon (¹⁴C), sulfur (³⁵S), tritium (³H), indium (^{115m}In, ^{113m}In, ¹¹²In, ¹¹¹In), and technetium (⁹⁹Tc, ^{99m}Tc), thallium (²⁰¹Ti), gallium (⁶⁸Ga, ⁶⁷Ga), palladium (¹⁰³Pd), molybdenum (⁹⁹Mo), xenon (¹³³Xe), fluorine (¹⁸F), ¹⁵³Sm, ¹⁷⁷Lu, ¹⁵⁹Gd, ¹⁴⁹Pm, ¹⁴⁰La, ¹⁷⁵Yb, ¹⁶⁶Ho, ⁹⁰Y, ⁴⁷Sc, ¹⁸⁶Re, ¹⁸⁸Re, ¹⁴²Pr, ¹⁰⁵Rh, ⁹⁷Ru; luminescent labels, such as luminol; and fluorescent labels, such as fluorescein and rhodamine, and biotin.

[0391] In addition to assaying levels of polypeptide of the present invention in a biological sample, proteins can also be detected in vivo by imaging. Antibody labels or markers for in vivo imaging of protein include those detectable by X-radiography, NMR or ESR. For X-radiography, suitable labels include radioisotopes such as barium or cesium, which emit detectable radiation but are not overtly harmful to the subject. Suitable markers for NMR and ESR include those with a detectable characteristic spin, such as deuterium, which may be incorporated into the antibody by labeling of nutrients for the relevant hybridoma.

[0392] A protein-specific antibody or antibody fragment which has been labeled with an appropriate detectable imaging moiety, such as a radioisotope (for example, ¹³¹I, ¹¹²In, ^{99m}Tc, (¹³¹I, ¹²⁵I, ¹²³I, ¹²¹I), carbon (¹⁴C), sulfur (³⁵S), tritium (³H), indium (^{115m}In, ^{113m}In, ¹¹²In, ¹¹¹In), and technetium (⁹⁹Tc, ^{99m}Tc), thallium (²⁰¹Ti), gallium (⁶⁸Ga, ⁶⁷Ga), palladium (¹⁰³Pd), molybdenum (⁹⁹Mo), xenon (¹³³Xe), fluorine (¹⁸F, ¹⁵³Sm, ¹⁷⁷Lu, ¹⁵⁹Gd, ¹⁴⁹Pm, ¹⁴⁰La, ¹⁷⁵Yb, ¹⁶⁶Ho, ⁹⁰Y, ⁴⁷Sc, ¹⁸⁶Re, ¹⁸⁸Re, ¹⁴²Pr, ¹⁰⁵Rh, ⁹⁷Ru), a radio-opaque substance, or a material detectable by nuclear magnetic resonance, is introduced (for example, parenterally, subcutaneously or intraperitoneally) into the mammal to be examined for immune system disorder. It will be understood in the art that the size of the subject and the imaging system used will determine the quantity of imaging moiety needed to produce diagnostic images. In the case of a radioisotope moiety, for a human subject, the quantity of radioactivity injected will normally range from about 5 to 20 millicuries of ^{99m}Tc. The labeled antibody or antibody fragment will then preferentially accumulate at the location of cells which express the polypeptide encoded by a polynucleotide of the invention. In vivo tumor imaging is described in S. W. Burchiel et al., “Immunopharmacokinetics of Radiolabeled Antibodies and Their Fragments” (Chapter 13 in Tumor Imaging: The Radiochemical Detection of Cancer, S. W. Burchiel and B. A. Rhodes, eds., Masson Publishing Inc. (1982)).

[0393] In one embodiment, the invention provides a method for the specific delivery of compositions of the invention to cells by administering polypeptides of the invention (e.g., polypeptides encoded by polynucleotides of the invention and/or antibodies) that are associated with heterologous polypeptides or nucleic acids. In one example, the invention provides a method for delivering a therapeutic protein into the targeted cell. In another example, the invention provides a method for delivering a single stranded nucleic acid (e.g., antisense or ribozymes) or double stranded nucleic acid (e.g., DNA that can integrate into the cell's genome or replicate episomally and that can be transcribed) into the targeted cell.

[0394] In another embodiment, the invention provides a method for the specific destruction of cells (e.g., the destruction of tumor cells) by administering polypeptides of the invention in association with toxins or cytotoxic prodrugs.

[0395] By “toxin” is meant one or more compounds that bind and activate endogenous cytotoxic effector systems, radioisotopes, holotoxins, modified toxins, catalytic subunits of toxins, or any molecules or enzymes not normally present in or on the surface of a cell that under defined conditions cause the cell's death. Toxins that may be used according to the methods of the invention include, but are not limited to, radioisotopes known in the art, compounds such as, for example, antibodies (or complement fixing containing portions thereof) that bind an inherent or induced endogenous cytotoxic effector system, thymidine kinase, endonuclease, RNAse, alpha toxin, ricin, abrin, Pseudomonas exotoxin A, diphtheria toxin, saporin, momordin, gelonin, pokeweed antiviral protein, alpha-sarcin and cholera toxin. “Toxin” also includes a cytostatic or cytocidal agent, a therapeutic agent or a radioactive metal ion, e.g., alpha-emitters such as, for example, ²¹³Bi, or other radioisotopes such as, for example, ¹⁰³Pd, ¹³³Xe, ¹³¹I, ⁶⁸Ge, ⁵⁷Co, ⁶⁵Zn, ⁸⁵Sr, ³²P, ³⁵S, ⁹⁰Y, ¹⁵³Sm, ¹⁵³Gd, ¹⁶⁹Yb, ⁵¹Cr, ⁵⁴Mn, ⁷⁵Se, ¹¹³Sn, ⁹⁰Yttrium, ¹¹⁷Tin, ¹⁸⁶Rhenium, ¹⁶⁶Holmium, and ¹⁸⁸Rhenium; luminescent labels, such as luminol; and fluorescent labels, such as fluorescein and rhodamine, and biotin. In a specific embodiment, the invention provides a method for the specific destruction of cells (e.g., the destruction of tumor cells) by administering polypeptides of the invention or antibodies of the invention in association with the radioisotope ⁹⁰Y. In another specific embodiment, the invention provides a method for the specific destruction of cells (e.g., the destruction of tumor cells) by administering polypeptides of the invention or antibodies of the invention in association with the radioisotope ¹¹¹In. In a further specific embodiment, the invention provides a method for the specific destruction of cells (e.g., the destruction of tumor cells) by administering polypeptides of the invention or antibodies of the invention in association with the radioisotope ¹³¹I.

[0396] Techniques known in the art may be applied to label polypeptides of the invention (including antibodies). Such techniques include, but are not limited to, the use of bifunctional conjugating agents (see e.g., U.S. Pat. Nos. 5,756,065; 5,714,63 1; 5,696,239; 5,652,361; 5,505,931; 5,489,425; 5,435,990; 5,428,139; 5,342,604; 5,274,119; 4,994,560; and 5,808,003; the contents of each of which are hereby incorporated by reference in its entirety).

[0397] Thus, the invention provides a diagnostic method of a disorder, which involves (a) assaying the expression level of a polypeptide of the present invention in cells or body fluid of an individual; and (b) comparing the assayed polypeptide expression level with a standard polypeptide expression level, whereby an increase or decrease in the assayed polypeptide expression level compared to the standard expression level is indicative of a disorder. With respect to cancer, the presence of a relatively high amount of transcript in biopsied tissue from an individual may indicate a predisposition for the development of the disease, or may provide a means for detecting the disease prior to the appearance of actual clinical symptoms. A more definitive diagnosis of this type may allow health professionals to employ preventative measures or aggressive treatment earlier thereby preventing the development or further progression of the cancer.

[0398] Moreover, polypeptides of the present invention can be used to treat or prevent diseases or conditions such as, for example, neural disorders, immune system disorders, muscular disorders, reproductive disorders, gastrointestinal disorders, pulmonary disorders, cardiovascular disorders, renal disorders, proliferative disorders, and/or cancerous diseases and conditions. For example, patients can be administered a polypeptide of the present invention in an effort to replace absent or decreased levels of the polypeptide (e.g., insulin), to supplement absent or decreased levels of a different polypeptide (e.g., hemoglobin S for hemoglobin B, SOD, catalase, DNA repair proteins), to inhibit the activity of a polypeptide (e.g., an oncogene or tumor supressor), to activate the activity of a polypeptide (e.g., by binding to a receptor), to reduce the activity of a membrane bound receptor by competing with it for free ligand (e.g., soluble TNF receptors used in reducing inflammation), or to bring about a desired response (e.g., blood vessel growth inhibition, enhancement of the immune response to proliferative cells or tissues).

[0399] Similarly, antibodies directed to a polypeptide of the present invention can also be used to treat disease (as described supra, and elsewhere herein). For example, administration of an antibody directed to a polypeptide of the present invention can bind, and/or neutralize the polypeptide, and/or reduce overproduction of the polypeptide. Similarly, administration of an antibody can activate the polypeptide, such as by binding to a polypeptide bound to a membrane (receptor).

[0400] At the very least, the polypeptides of the present invention can be used as molecular weight markers on SDS-PAGE gels or on molecular sieve gel filtration columns using methods well known to those of skill in the art. Polypeptides can also be used to raise antibodies, which in turn are used to measure protein expression from a recombinant cell, as a way of assessing transformation of the host cell. Moreover, the polypeptides of the present invention can be used to test the biological activities described herein.

[0401] Diagnostic Assays

[0402] The compounds of the present invention are useful for diagnosis, treatment, prevention and/or prognosis of various disorders in mammals, preferably humans. Such disorders include, but are not limited to, those described herein under the section heading “Biological Activities”.

[0403] For a number of disorders, substantially altered (increased or decreased) levels of gene expression can be detected in tissues, cells or bodily fluids (e.g., sera, plasma, urine, semen, synovial fluid or spinal fluid) taken from an individual having such a disorder, relative to a “standard” gene expression level, that is, the expression level in tissues or bodily fluids from an individual not having the disorder. Thus, the invention provides a diagnostic method useful during diagnosis of a disorder, which involves measuring the expression level of the gene encoding the polypeptide in tissues, cells or body fluid from an individual and comparing the measured gene expression level with a standard gene expression level, whereby an increase or decrease in the gene expression level(s) compared to the standard is indicative of a disorder. These diagnostic assays may be performed in vivo or in vitro, such as, for example, on blood samples, biopsy tissue or autopsy tissue.

[0404] The present invention is also useful as a prognostic indicator, whereby patients exhibiting enhanced or depressed gene expression will experience a worse clinical outcome relative to patients expressing the gene at a level nearer the standard level.

[0405] In certain embodiments, a polypeptide of the invention, or polynucleotides, antibodies, agonists, or antagonists corresponding to that polypeptide, may be used to diagnose and/or prognose diseases and/or disorders associated with the tissue(s) in which the polypeptide of the invention is expressed, including one, two, three, four, five, or more tissues disclosed in Table 1A, column 8 (Tissue Distribution Library Code).

[0406] By “assaying the expression level of the gene encoding the polypeptide” is intended qualitatively or quantitatively measuring or estimating the level of the polypeptide of the invention or the level of the mRNA encoding the polypeptide of the invention in a first biological sample either directly (e.g., by determining or estimating absolute protein level or mRNA level) or relatively (e.g., by comparing to the polypeptide level or mRNA level in a second biological sample). Preferably, the polypeptide expression level or mRNA level in the first biological sample is measured or estimated and compared to a standard polypeptide level or mRNA level, the standard being taken from a second biological sample obtained from an individual not having the disorder or being determined by averaging levels from a population of individuals not having the disorder. As will be appreciated in the art, once a standard polypeptide level or mRNA level is known, it can be used repeatedly as a standard for comparison.

[0407] By “biological sample” is intended any biological sample obtained from an individual, cell line, tissue culture, or other source containing polypeptides of the invention (including portions thereof) or mRNA. As indicated, biological samples include body fluids (such as sera, plasma, urine, synovial fluid and spinal fluid) and tissue sources found to express the full length or fragments thereof of a polypeptide or mRNA. Methods for obtaining tissue biopsies and body fluids from mammals are well known in the art. Where the biological sample is to include mRNA, a tissue biopsy is the preferred source.

[0408] Total cellular RNA can be isolated from a biological sample using any suitable technique such as the single-step guanidinium-thiocyanate-phenol-chloroform method described in Chomczynski and Sacchi, Anal. Biochem. 162:156-159 (1987). Levels of mRNA encoding the polypeptides of the invention are then assayed using any appropriate method. These include Northern blot analysis, S1 nuclease mapping, the polymerase chain reaction (PCR), reverse transcription in combination with the polymerase chain reaction (RT-PCR), and reverse transcription in combination with the ligase chain reaction (RT-LCR).

[0409] The present invention also relates to diagnostic assays such as quantitative and diagnostic assays for detecting levels of polypeptides of the invention, in a biological sample (e.g., cells and tissues), including determination of normal and abnormal levels of polypeptides. Thus, for instance, a diagnostic assay in accordance with the invention for detecting over-expression of polypeptides of the invention compared to normal control tissue samples may be used to detect the presence of tumors. Assay techniques that can be used to determine levels of a polypeptide, such as a polypeptide of the present invention in a sample derived from a host are well-known to those of skill in the art. Such assay methods include radioimmunoassays, competitive-binding assays, Western Blot analysis and ELISA assays. Assaying polypeptide levels in a biological sample can occur using any art-known method.

[0410] Assaying polypeptide levels in a biological sample can occur using antibody-based techniques. For example, polypeptide expression in tissues can be studied with classical immunohistological methods (Jalkanen et al., J. Cell. Biol. 101:976-985 (1985); Jalkanen, M., et al., J. Cell . Biol. 105:3087-3096 (1987)). Other antibody-based methods useful for detecting polypeptide gene expression include immunoassays, such as the enzyme linked immunosorbent assay (ELISA) and the radioimmunoassay (RIA). Suitable antibody assay labels are known in the art and include enzyme labels, such as, glucose oxidase, and radioisotopes, such as iodine (¹²⁵I, ¹²¹I), carbon (¹⁴C), sulfur (³⁵S), tritium (³H), indium (¹¹²In), and technetium (^{99m}Tc), and fluorescent labels, such as fluorescein and rhodamine, and biotin.

[0411] The tissue or cell type to be analyzed will generally include those which are known, or suspected, to express the gene of inteest (such as, for example, cancer). The protein isolation methods employed herein may, for example, be such as those described in Harlow and Lane (Harlow, E. and Lane, D., 1988, “Antibodies: A Laboratory Manual”, Cold Spring Harbor Laboratory Press, Cold Spring Harbor, N.Y.), which is incorporated herein by reference in its entirety. The isolated cells can be derived from cell culture or from a patient. The analysis of cells taken from culture may be a necessary step in the assessment of cells that could be used as part of a cell-based gene therapy technique or, alternatively, to test the effect of compounds on the expression of the gene.

[0412] For example, antibodies, or fragments of antibodies, such as those described herein, may be used to quantitatively or qualitatively detect the presence of gene products or conserved variants or peptide fragments thereof. This can be accomplished, for example, by immunofluorescence techniques employing a fluorescently labeled antibody coupled with light microscopic, flow cytometric, or fluorimetric detection.

[0413] In a preferred embodiment, antibodies, or fragments of antibodies directed to any one or all of the predicted epitope domains of the polypeptides of the invention (shown in column 7 of Table 1A) may be used to quantitatively or qualitatively detect the presence of gene products or conserved variants or peptide fragments thereof. This can be accomplished, for example, by immunofluorescence techniques employing a fluorescently labeled antibody coupled with light microscopic, flow cytometric, or fluorimetric detection.

[0414] In an additional preferred embodiment, antibodies, or fragments of antibodies directed to a conformational epitope of a polypeptide of the invention may be used to quantitatively or qualitatively detect the presence of gene products or conserved variants or peptide fragments thereof. This can be accomplished, for example, by immunofluorescence techniques employing a fluorescently labeled antibody coupled with light microscopic, flow cytometric, or fluorimetric detection.

[0415] The antibodies (or fragments thereof), and/or polypeptides of the present invention may, additionally, be employed histologically, as in immunofluorescence, immunoelectron microscopy or non-immunological assays, for in situ detection of gene products or conserved variants or peptide fragments thereof. In situ detection may be accomplished by removing a histological specimen from a patient, and applying thereto a labeled antibody or polypeptide of the present invention. The antibody (or fragment thereof) or polypeptide is preferably applied by overlaying the labeled antibody (or fragment) onto a biological sample. Through the use of such a procedure, it is possible to determine not only the presence of the gene product, or conserved variants or peptide fragments, or polypeptide binding, but also its distribution in the examined tissue. Using the present invention, those of ordinary skill will readily perceive that any of a wide variety of histological methods (such as staining procedures) can be modified in order to achieve such in situ detection.

[0416] Immunoassays and non-immunoassays for gene products or conserved variants or peptide fragments thereof will typically comprise incubating a sample, such as a biological fluid, a tissue extract, freshly harvested cells, or lysates of cells which have been incubated in cell culture, in the presence of a detectably labeled antibody capable of binding gene products or conserved variants or peptide fragments thereof, and detecting the bound antibody by any of a number of techniques well-known in the art.

[0417] The biological sample may be brought in contact with and immobilized onto a solid phase support or carrier such as nitrocellulose, or other solid support which is capable of immobilizing cells, cell particles or soluble proteins. The support may then be washed with suitable buffers followed by treatment with the detectably labeled antibody or detectable polypeptide of the invention. The solid phase support may then be washed with the buffer a second time to remove unbound antibody or polypeptide. Optionally the antibody is subsequently labeled. The amount of bound label on solid support may then be detected by conventional means.

[0418] By “solid phase support or carrier” is intended any support capable of binding an antigen or an antibody. Well-known supports or carriers include glass, polystyrene, polypropylene, polyethylene, dextran, nylon, amylases, natural and modified celluloses, polyacrylamides, gabbros, and magnetite. The nature of the carrier can be either soluble to some extent or insoluble for the purposes of the present invention. The support material may have virtually any possible structural configuration so long as the coupled molecule is capable of binding to an antigen or antibody. Thus, the support configuration may be spherical, as in a bead, or cylindrical, as in the inside surface of a test tube, or the external surface of a rod. Alternatively, the surface may be flat such as a sheet, test strip, etc. Preferred supports include polystyrene beads. Those skilled in the art will know many other suitable carriers for binding antibody or antigen, or will be able to ascertain the same by use of routine experimentation.

[0419] The binding activity of a given lot of antibody or antigen polypeptide may be determined according to well known methods. Those skilled in the art will be able to determine operative and optimal assay conditions for each determination by employing routine experimentation.

[0420] In addition to assaying polypeptide levels or polynucleotide levels in a biological sample obtained from an individual, polypeptide or polynucleotide can also be detected in vivo by imaging. For example, in one embodiment of the invention, polypeptides and/or antibodies of the invention are used to image diseased cells, such as neoplasms., In another embodiment, polynucleotides of the invention (e.g., polynucleotides complementary to all or a portion of an mRNA) and/or antibodies (e.g., antibodies directed to any one or a combination of the epitopes of a polypeptide of the invention, antibodies directed to a conformational epitope of a polypeptide of the invention, or antibodies directed to the full length polypeptide expressed on the cell surface of a mammalian cell) are used to image diseased or neoplastic cells.

[0421] Antibody labels or markers for in vivo imaging of polypeptides of the invention include those detectable by X-radiography, NMR, MRI, CAT-scans or ESR. For X-radiography, suitable labels include radioisotopes such as barium or cesium, which emit detectable radiation but are not overtly harmful to the subject. Suitable markers for NMR and ESR include those with a detectable characteristic spin, such as deuterium, which may be incorporated into the antibody by labeling of nutrients for the relevant hybridoma. Where in vivo imaging is used to detect enhanced levels of polypeptides for diagnosis in humans, it may be preferable to use human antibodies or “humanized” chimeric monoclonal antibodies. Such antibodies can be produced using techniques described herein or otherwise known in the art. For example methods for producing chimeric antibodies are known in the art. See, for review, Morrison, Science 229:1202 (1985); Oi et al., BioTechniques 4:214 (1986); Cabilly et al., U.S. Pat. No. 4,816,567; Taniguchi et al., EP 171496; Morrison et al., EP 173494; Neuberger et al., WO 8601533; Robinson et al., WO 8702671; Boulianne et al., Nature 312:643 (1984); Neuberger et al., Nature 314:268 (1985).

[0422] Additionally, any polypeptides of the invention whose presence can be detected, can be administered. For example, polypeptides of the invention labeled with a radio-opaque or other appropriate compound can be administered and visualized in vivo, as discussed, above for labeled antibodies. Further, such polypeptides can be utilized for in vitro diagnostic procedures.

[0423] A polypeptide-specific antibody or antibody fragment which has been labeled with an appropriate detectable imaging moiety, such as a radioisotope (for example, ¹³¹I, ¹¹²In, ^{99m}Tc), a radio-opaque substance, or a material detectable by nuclear magnetic resonance, is introduced (for example, parenterally, subcutaneously or intraperitoneally) into the mammal to be examined for a disorder. It will be understood in the art that the size of the subject and the imaging system used will determine the quantity of imaging moiety needed to produce diagnostic images. In the case of a radioisotope moiety, for a human subject, the quantity of radioactivity injected will normally range from about 5 to 20 millicuries of ^{99m}Tc. The labeled antibody or antibody fragment will then preferentially accumulate at the location of cells which contain the antigenic protein. In vivo tumor imaging is described in S. W. Burchiel et al., “Immunopharmacokinetics of Radiolabeled Antibodies and Their Fragments” (Chapter 13 in Tumor Imaging: The Radiochemical Detection of Cancer, S. W. Burchiel and B. A. Rhodes, eds., Masson Publishing Inc. (1982)).

[0424] With respect to antibodies, one of the ways in which an antibody of the present invention can be detectably labeled is by linking the same to a reporter enzyme and using the linked product in an enzyme immunoassay (EIA) (Voller, A., “The Enzyme Linked Immunosorbent Assay (ELISA)”, 1978, Diagnostic Horizons 2:1-7, Microbiological Associates Quarterly Publication, Walkersville, Md.); Voller et al., J. Clin. Pathol. 31:507-520 (1978); Butler, J. E., Meth. Enzymol. 73:482-523 (1981); Maggio, E. (ed.), 1980, Enzyme Immunoassay, CRC Press, Boca Raton, Fla.,; Ishikawa, E. et al., (eds.), 1981, Enzyme Immunoassay, Kgaku Shoin, Tokyo). The reporter enzyme which is bound to the antibody will react with an appropriate substrate, preferably a chromogenic substrate, in such a manner as to produce a chemical moiety which can be detected, for example, by spectrophotometric, fluorimetric or by visual means. Reporter enzymes which can be used to detectably label the antibody include, but are not limited to, malate dehydrogenase, staphylococcal nuclease, delta-5-steroid isomerase, yeast alcohol dehydrogenase, alpha-glycerophosphate, dehydrogenase, triose phosphate isomerase, horseradish peroxidase, alkaline phosphatase, asparaginase, glucose oxidase, beta-galactosidase, ribonuclease, urease, catalase, glucose-6-phosphate dehydrogenase, glucoamylase and acetylcholinesterase. Additionally, the detection can be accomplished by colorimetric methods which employ a chromogenic substrate for the reporter enzyme. Detection may also be accomplished by visual comparison of the extent of enzymatic reaction of a substrate in comparison with similarly prepared standards.

[0425] Detection may also be accomplished using any of a variety of other immunoassays. For example, by radioactively labeling the antibodies or antibody fragments, it is possible to detect polypeptides through the use of a radioimmunoassay (RIA) (see, for example, Weintraub, B., Principles of Radioimmunoassays, Seventh Training Course on Radioligand Assay Techniques, The Endocrine Society, March, 1986, which is incorporated by reference herein). The radioactive isotope can be detected by means including, but not limited to, a gamma counter, a scintillation counter, or autoradiography.

[0426] It is also possible to label the antibody with a fluorescent compound. When the fluorescently labeled antibody is exposed to light of the proper wave length, its presence can then be detected due to fluorescence. Among the most commonly used fluorescent labeling compounds are fluorescein isothiocyanate, rhodamine, phycoerythrin, phycocyanin, allophycocyanin, ophthaldehyde and fluorescamine.

[0427] The antibody can also be detectably labeled using fluorescence emitting metals such as ¹⁵²Eu, or others of the lanthanide series. These metals can be attached to the antibody using such metal chelating groups as diethylenetriaminepentacetic acid (DTPA) or ethylenediaminetetraacetic acid (EDTA).

[0428] The antibody also can be detectably labeled by coupling it to a chemiluminescent compound. The presence of the chemiluminescent-tagged antibody is then determined by detecting the presence of luminescence that arises during the course of a chemical reaction. Examples of particularly useful chemiluminescent labeling compounds are luminol, isoluminol, theromatic acridinium ester, imidazole, acridinium salt and oxalate ester.

[0429] Likewise, a bioluminescent compound may be used to label the antibody of the present invention. Bioluminescence is a type of chemiluminescence found in biological systems in, which a catalytic protein increases the efficiency of the chemiluminescent reaction. The presence of a bioluminescent protein is determined by detecting the presence of luminescence. Important bioluminescent compounds for purposes of labeling are luciferin, luciferase and aequorin.

[0430] Methods for Detecting Diseases

[0431] In general, a disease may be detected in a patient based on the presence of one or more proteins of the invention and/or polynucleotides encoding such proteins in a biological sample (for example, blood, sera, urine, and/or tumor biopsies) obtained from the patient. In other words, such proteins may be used as markers to indicate the presence or absence of a disease or disorder, including cancer and/or as described elsewhere herein. In addition, such proteins may be useful for the detection of other diseases and cancers. The binding agents provided herein generally permit detection of the level of antigen that binds to the agent in the biological sample. Polynucleotide primers and probes may be used to detect the level of mRNA encoding polypeptides of the invention, which is also indicative of the presence or absence of a disease or disorder, including cancer. In general, polypeptides of the invention should be present at a level that is at least three fold higher in diseased tissue than in normal tissue.

[0432] There are a variety of assay formats known to those of ordinary skill in the art for using a binding agent to detect polypeptide markers in a sample. See, e.g., Harlow and Lane, supra. In general, the presence or absence of a disease in a patient may be determined by (a) contacting a biological sample obtained from a patient with a binding agent; (b) detecting in the sample a level of polypeptide that binds to the binding agent; and (c) comparing the level of polypeptide with a predetermined cut-off value.

[0433] In a preferred embodiment, the assay involves the use of a binding agent(s) immobilized on a solid support to bind to and remove the polypeptide of the invention from the remainder of the sample. The bound polypeptide may then be detected using a detection reagent that contains a reporter group and specifically binds to the binding agent/polypeptide complex. Such detection reagents may comprise, for example, a binding agent that specifically binds to the polypeptide or an antibody or other agent that specifically binds to the binding agent, such as an anti-immunoglobulin, protein G, protein A or a lectin. Alternatively, a competitive assay may be utilized, in which a polypeptide is labeled with a reporter group and allowed to bind to the immobilized binding agent after incubation-of the binding agent with the sample. The extent to which components of the sample inhibit the binding of the labeled polypeptide to the binding agent is indicative of the reactivity of the sample with the immobilized binding agent. Suitable polypeptides for use within such assays include polypeptides of the invention and portions thereof, or antibodies, to which the binding agent binds, as described above.

[0434] The solid support may be any material known to those of skill in the art to which polypeptides of the invention may be attached. For example, the solid support may be a test well in a microtiter plate or a nitrocellulose or other suitable membrane. Alternatively, the support may be a bead or disc, such as glass fiberglass, latex or a plastic material such as polystyrene or polyvinylchloride. The support may also be a magnetic particle or a fiber optic sensor, such as those disclosed, for example, in U.S. Pat. No. 5,359,681. The binding agent may be immobilized on the solid support using a variety of techniques known to those of skill in the art, which are amply described in the patent and scientific literature. In the context of the present invention, the term “immobilization” refers to both noncovalent association, such as adsorption, and covalent attachment (which may be a direct linkage between the agent and functional groups on the support or may be a linkage by way of a cross-linking agent). Immobilization by adsorption to a well in a microtiter plate or to a membrane is preferred. In such cases, adsorption may be achieved by contacting the binding agent, in a suitable buffer, with the solid support-for the suitable amount of time. The contact time varies with temperature, but is typically between about 1 hour and about 1 day. In general, contacting a well of plastic microtiter plate (such as polystyrene or polyvinylchloride) with an amount of binding agent ranging from about 10 ng to about 10 ug, and preferably about 100 ng to about 1 ug, is sufficient to immobilize an adequate amount of binding agent.

[0435] Covalent attachment of binding agent to a solid support may generally be achieved by first reacting the support with a bifunctional reagent that will react with both the support and a functional group, such as a hydroxyl or amino group, on the binding agent. For example, the binding agent may be covalently attached to supports having an appropriate polymer coating using benzoquinone or by condensation of an aldehyde group on the support with an amine and an active hydrogen on the binding partner (see, e.g., Pierce Immunotechnology Catalog and Handbook, 1991, at A12-A13).

[0436] Gene Therapy Methods

[0437] Also encompassed by the invention are gene therapy methods for treating or preventing disorders, diseases and conditions. The gene therapy methods relate to the introduction of nucleic acid (DNA, RNA and antisense DNA or RNA) sequences into an animal to achieve expression of the polypeptide of the present invention. This method requires a polynucleotide which codes for a polypeptide of the present invention operatively linked to a promoter and any other genetic elements necessary for the expression of the polypeptide by the target tissue. Such gene therapy and delivery techniques are known in the art, see, for example, WO90/11092, which is herein incorporated by reference.

[0438] Thus, for example, cells from a patient may be engineered with a polynucleotide (DNA or RNA) comprising a promoter operably linked to a polynucleotide of the present invention ex vivo, with the engineered cells then being provided to a patient to be treated with the polypeptide of the present invention. Such methods are well-known in the art. For example, see Belldegrun, A., et al., J. Natl. Cancer Inst. 85: 207-216 (1993); Ferrantini, M. et al., Cancer Research 53: 1107-1112 (1993); Ferrantini, M. et al., J. Immunology 153: 4604-4615 (1994); Kaido, T., et al., Int. J. Cancer 60: 221-229 (1995); Ogura, H., et al., Cancer Research 50: 5102-5106 (1990); Santodonato, L., et al., Human Gene Therapy 7:1-10 (1996); Santodonato, L., et al., Gene Therapy 4:1246-1255 (1997); and Zhang, J.-F. et al., Cancer Gene Therapy 3: 31-38 (1996)), which are herein incorporated by reference. In one embodiment, the cells which are engineered are arterial cells. The arterial cells may be reintroduced into the patient through direct injection to the artery, the tissues surrounding the artery, or through catheter injection.

[0439] As discussed in more detail below, the polynucleotide constructs can be delivered by any method that delivers injectable materials to the cells of an animal, such as, injection into the interstitial space of tissues (heart, muscle, skin, lung, liver, and the like). The polynucleotide constructs may be delivered in a pharmaceutically acceptable liquid or aqueous carrier.

[0440] In one embodiment, the polynucleotide of the present invention is delivered as a naked polynucleotide. The term “naked” polynucleotide, DNA or RNA refers to sequences that are free from any delivery vehicle that acts to assist, promote or facilitate entry into the cell, including viral sequences, viral particles, liposome formulations, lipofectin or precipitating agents and the like. However, the polynucleotide of the present invention can also be delivered in liposome formulations and lipofectin formulations and the like can be prepared by methods well known to those skilled in the art. Such methods are described, for example, in U.S. Pat. Nos. 5,593,972, 5,589,466, and 5,580,859, which are herein incorporated by reference.

[0441] The polynucleotide vector constructs used in the gene therapy method are preferably constructs that will not integrate into the host genome nor will they contain sequences that allow for replication. Appropriate vectors include pWLNEO, pSV2CAT, pOG44, pXT1 and pSG available from Stratagene; pSVK3, pBPV, pMSG and pSVL available from Pharmacia; and pEF1/V5, pcDNA3.1, and pRc/CMV2 available from Invitrogen. Other suitable vectors will be readily apparent to the skilled artisan.

[0442] Any strong promoter known to those skilled in the art can be used for driving the expression of the polynucleotide sequence. Suitable promoters include adenoviral promoters, such as the adenoviral major late promoter; or heterologous promoters, such as the cytomegalovirus (CMV) promoter; the respiratory syncytial virus (RSV) promoter; inducible promoters, such as the MMT promoter, the metallothionein promoter; heat shock promoters; the albumin promoter; the ApoAI promoter; human globin promoters; viral thymidine kinase promoters, such as the Herpes Simplex thymidine kinase promoter; retroviral LTRs; the b-actin promoter; and human growth hormone promoters. The promoter also may be the native promoter for the polynucleotide of the present invention.

[0443] Unlike other gene therapy techniques, one major advantage of introducing naked nucleic acid sequences into target cells is the transitory nature of the polynucleotide synthesis in the cells. Studies have shown that non-replicating DNA sequences can be introduced into cells to provide production of the desired polypeptide for periods of up to six months.

[0444] The polynucleotide construct can be delivered to the interstitial space of tissues within the an animal, including of muscle, skin, brain, lung, liver, spleen, bone marrow, thymus, heart, lymph, blood, bone, cartilage, pancreas, kidney, gall bladder, stomach, intestine, testis, ovary, uterus, rectum, nervous system, eye, gland, and connective tissue. Interstitial space of the tissues comprises the intercellular, fluid, mucopolysaccharide matrix among the reticular fibers of organ tissues, elastic fibers in the walls of vessels or chambers, collagen fibers of fibrous tissues, or that same matrix within connective tissue ensheathing muscle cells or in the lacunae of bone. It is similarly the space occupied by the plasma of the circulation and the lymph fluid of the lymphatic channels. Delivery to the interstitial space of muscle tissue is preferred for the reasons discussed below. They may be conveniently delivered by injection into the tissues comprising these cells. They are preferably delivered to and expressed in persistent, non-dividing cells which are differentiated, although delivery and expression may be achieved in non-differentiated or less completely differentiated cells, such as, for example, stem cells of blood or skin fibroblasts. In vivo muscle cells are particularly competent in their ability to take up and express polynucleotides.

[0445] For the naked nucleic acid sequence injection, an effective dosage amount of DNA or RNA will be in the range of from about 0.05 mg/kg body weight to about 50 mg/kg body weight. Preferably the dosage will be from about 0.005 mg/kg to about 20 mg/kg and more preferably from about 0.05 mg/kg to about 5 mg/kg. Of course, as the artisan of ordinary skill will appreciate, this dosage will vary according to the tissue site of injection. The appropriate and effective dosage of nucleic acid sequence can readily be determined by those of ordinary skill in the art and may depend on the condition being treated and the route of administration.

[0446] The preferred route of administration is by the parenteral route of injection into the interstitial space of tissues. However, other parenteral routes may also be used, such as, inhalation of an aerosol formulation particularly for delivery to lungs or bronchial tissues, throat or mucous membranes of the nose. In addition, naked DNA constructs can be delivered to arteries during angioplasty by the catheter used in the procedure.

[0447] The naked polynucleotides are delivered by any method known in the art, including, but not limited to, direct needle injection at the delivery site, intravenous injection, topical administration, catheter infusion, and so-called “gene guns”. These delivery methods are known in the art.

[0448] The constructs may also be delivered with delivery vehicles such as viral sequences, viral particles, liposome formulations, lipofectin, precipitating agents, etc. Such methods of delivery are known in the art.

[0449] In certain embodiments, the polynucleotide constructs are complexed in a liposome preparation. Liposomal preparations for use in the instant invention include cationic (positively charged), anionic (negatively charged) and neutral preparations. However, cationic liposomes are particularly preferred because a tight charge complex can be formed between the cationic liposome and the polyanionic nucleic acid. Cationic liposomes have been shown to mediate intracellular delivery of plasmid DNA (Felgner et al., Proc. Natl. Acad. Sci. USA (1987) 84:7413-7416, which is herein incorporated by reference); mRNA (Malone et al., Proc. Natl. Acad. Sci. USA (1989) 86:6077-6081, which is herein incorporated by reference); and purified transcription factors (Debs et al., J. Biol. Chem. (1990) 265:10189-10192, which is herein incorporated by reference), in functional form.

[0450] Cationic liposomes are readily available. For example, N[1-2,3-dioleyloxy)propyl]-N,N,N-triethylammonium (DOTMA) liposomes are particularly useful and are available under the trademark Lipofectin, from GIBCO BRL, Grand Island, N.Y. (See, also, Felgner et al., Proc. Natl Acad. Sci. USA (1987) 84:7413-7416, which is herein incorporated-by reference). Other commercially available liposomes include transfectace (DDAB/DOPE) and DOTAP/DOPE (Boehringer).

[0451] Other cationic liposomes can be prepared from readily available materials using techniques well known in the art. See, e.g. PCT Publication No. WO 90/11092 (which is herein incorporated by reference) for a description of the synthesis of DOTAP (1,2-bis(oleoyloxy)-3-(trimethylammonio)propane) liposomes Preparation of DOTMA liposomes is explained in the literature, see, e.g., P. Felgner et al., Proc. Natl. Acad. Sci. USA 84:7413-7417, which is herein incorporated by reference. Similar methods can be used to prepare liposomes from other cationic lipid materials.

[0452] Similarly, anionic and neutral liposomes are readily available, such as from Avanti Polar Lipids (Birmingham, Ala.), or can be easily prepared using readily available materials. Such materials include phosphatidyl, choline, cholesterol, phosphatidyl ethanolamine, dioleoylphosphatidyl choline (DOPC), dioleoylphosphatidyl glycerol (DOPG), dioleoylphoshatidyl ethanolamine (DOPE), among others. These materials can also be mixed with the DOTMA and DOTAP starting materials in appropriate ratios. Methods for making liposomes using these materials are well known in the art.

[0453] For example, commercially dioleoylphosphatidyl choline (DOPC), dioleoylphosphatidyl glycerol (DOPG), and dioleoylphosphatidyl ethanolamine (DOPE) can be used in various combinations to make conventional liposomes, with or without the addition of cholesterol. Thus, for example, DOPG/DOPC vesicles can be prepared by drying 50 mg each of DOPG and DOPC under a stream of nitrogen gas into a sonication vial. The sample is placed under a vacuum pump overnight and is hydrated the following day with deionized water. The sample is then sonicated for 2 hours in a capped vial, using a Heat Systems model 350 sonicator equipped with an inverted cup (bath type) probe at the maximum setting while the bath is circulated at 15EC. Alternatively, negatively charged vesicles can be prepared without sonication to produce multilamellar vesicles or by extrusion through nucleopore membranes to produce unilamellar vesicles of discrete size. Other methods are known and available to those of skill in the art.

[0454] The liposomes can comprise multilamellar vesicles (MLVs), small unilamellar vesicles (SUVs), or large unilamellar vesicles (LUVs), with SUVs being preferred. The various liposome-nucleic acid complexes are prepared using methods well known in the art. See, e.g., Straubinger et al., Methods of Immunology (1983), 101:512-527, which is herein incorporated by reference. For example, MLVs containing nucleic acid can be prepared by depositing a thin film of phospholipid on the walls of a glass tube and subsequently hydrating with a solution of the material to be encapsulated. SUVs are prepared by extended sonication of MLVs to produce a homogeneous population of unilamellar liposomes. The material to be entrapped is added to a suspension of preformed MLVs and then'sonicated. When using liposomes containing cationic lipids, the dried lipid film is resuspended in an appropriate solution such as sterile water or an isotonic buffer solution such as 10 mM Tris/NaCl, sonicated, and then the preformed liposomes are mixed directly with the DNA. The liposome and DNA form a very stable complex due to binding of the positively charged liposomes to the cationic DNA. SUVs find use with small nucleic acid fragments. LUVs are prepared by a number of methods, well known in the art. Commonly used methods include Ca²⁺-EDTA chelation (Papahadjopoulos et al., Biochim. Biophys. Acta (1975) 394:483; Wilson et al., Cell 17:77 (1979)); ether injection (Deamer, D. and Bangham, A., Biochim. Biophys. Acta 443:629 (1976); Ostro et al., Biochem. Biophys. Res. Commun. 76:836 (1977); Fraley et al., Proc. Natl. Acad. Sci. USA 76:3348 (1979)); detergent dialysis (Enoch, H. and Strittmatter, P., Proc. Natl. Acad. Sci. USA 76:145 (1979)); and reverse-phase evaporation (REV) (Fraley et al., J. Biol. Chem. 255:10431 (1980); Szoka, F. and Papahadjopoulos, D., Proc. Natl. Acad. Sci. USA 75:145 (1978); Schaefer-Ridder et al., Science 215:166 (1982)), which are herein incorporated by reference.

[0455] Generally, the ratio of DNA to liposomes will be from about 10:1 to about 1:10. Preferably, the ration will be from about 5:1 to about 1:5. More preferably, the ration will be about 3:1 to about 1:3. Still more preferably, the ratio will be about 1:1.

[0456] U.S. Pat. No. 5,676,954 (which is herein incorporated by reference) reports on the injection of genetic material, complexed with cationic liposomes carriers, into mice. U.S. Pat. Nos. 4,897,355, 4,946,787, 5,049,386, 5,459,127, 5,589,466, 5,693,622, 5,580,859, 5,703,055, and international publication no. WO 94/9469 (which are herein incorporated by reference) provide cationic lipids for use in transfecting DNA into cells and mammals. U.S. Pat. Nos. 5,589,466, 5,693,622, 5,580,859, 5,703,055, and international publication no. WO 94/9469 provide methods for delivering DNA-cationic lipid complexes to mammals.

[0457] In certain embodiments, cells are engineered, ex vivo or in vivo, using a retroviral particle containing RNA which comprises a sequence encoding a polypeptide of the present invention. Retroviruses from which the retroviral plasmid vectors may be derived include, but are not limited to, Moloney Murine Leukemia Virus, spleen necrosis virus, Rous sarcoma Virus, Harvey Sarcoma Virus, avian leukosis virus, gibbon ape leukemia virus, human immunodeficiency virus, Myeloproliferative Sarcoma Virus, and mammary tumor virus.

[0458] The retroviral plasmid vector is employed to transduce packaging cell lines to form producer cell lines. Examples of packaging cells which may be transfected include, but are not limited to, the PE501, PA317, R-2, R-AM, PA12, T19-14X, VT-19-17-H2, RCRE, RCRIP, GP+E-86, GP+envAm12, and DAN cell lines as described in Miller, Human Gene Therapy 1:5-14 (1990), which is incorporated herein by reference in its entirety. The vector may transduce the packaging cells through any means known in the art. Such means include, but are not limited to, electroporation, the use of liposomes, and CaPO₄ precipitation. In one alternative, the retroviral plasmid vector may be encapsulated into a liposome, or coupled to a lipid, and then administered to a host.

[0459] The producer cell line generates infectious retroviral vector particles which include polynucleotide encoding a polypeptide of the present invention. Such retroviral vector particles then may be employed, to transduce eukaryotic cells, either in vitro or in vivo. The transduced eukaryotic cells will express a polypeptide of the present invention.

[0460] In certain other embodiments, cells are engineered, ex vivo or in vivo, with polynucleotide contained in an adenovirus vector. Adenovirus can be manipulated such that it encodes and expresses a polypeptide of the present invention, and at the same time is inactivated in terms of its ability to replicate in a normal lytic viral life cycle. Adenovirus expression is achieved without integration of the viral DNA into the host cell chromosome, thereby alleviating concerns about insertional mutagenesis. Furthermore, adenoviruses have been used as live enteric vaccines for many years with an excellent safety profile (Schwartz et al. Am. Rev. Respir. Dis.109:233-238 (1974)). Finally, adenovirus mediated gene transfer has been demonstrated in a number of instances including transfer of alpha-1-antitrypsin and CFTR to the lungs of cotton rats (Rosenfeld, M. A. et al. (1991) Science 252:431-434; Rosenfeld et al., (1992) Cell 68:143-155). Furthermore, extensive studies to attempt to establish adenovirus as a causative agent in human cancer were uniformly negative (Green, M. et al. (1979) Proc. Natl. Acad. Sci. USA 76:6606).

[0461] Suitable adenoviral vectors useful in the present invention are described, for example, in Kozarsky and Wilson, Curr. Opin. Genet. Devel. 3:499-503 (1993); Rosenfeld et al., Cell 68:143-155 (1992); Engelhardt et al., Human Genet. Ther. 4:759-769 (1993); Yang et al., Nature Genet. 7:362-369 (1994); Wilson et al., Nature 365:691-692 (1993); and U.S. Pat. No. 5,652,224, which are herein incorporated by reference. For example, the adenovirus vector Ad2 is useful and can be grown in human 293 cells. These cells contain the E1 region of adenovirus and constitutively express E1a and E1b, which complement the defective adenoviruses by providing the products of the genes deleted from the vector. In addition to Ad2, other varieties of adenovirus (e.g., Ad3, Ad5, and Ad7) are also useful in the present invention.

[0462] Preferably, the adenoviruses used in the present invention are replication deficient. Replication deficient adenoviruses require the aid of a helper virus and/or packaging cell line to form infectious particles. The resulting virus is capable of infecting cells and can express a polynucleotide of interest which is operably linked to a promoter, but cannot replicate in most cells. Replication deficient adenoviruses may be deleted in one or more of all or a portion of the following genes: E1a, E1b, E3, E4, E2a, or L1 through L5.

[0463] In certain other embodiments, the cells are engineered, ex vivo or in vivo, using an adeno-associated virus (AAV). AAVs are naturally occurring defective viruses that require helper viruses to produce infectious particles (Muzyczka, N., Curr. Topics in Microbiol. Immunol. 158:97 (1992)). It is also one of the few viruses that may integrate its DNA into non-dividing cells. Vectors containing as little as 300 base pairs of AAV can be packaged and can integrate, but space for exogenous DNA is limited to about 4.5 kb. Methods for producing and using such AAVs are known in the art. See, for example, U.S. Patent Nos. 5,139,941, 5,173,414, 5,354,678, 5,436,146, 5,474,935, 5,478,745, and 5,589,377.

[0464] For example, an appropriate AAV vector for use in the present invention will include all the sequences necessary for DNA replication, encapsidation, and host-cell integration. The polynucleotide construct is inserted into the AAV vector using standard cloning methods, such as those found in Sambrook et al., Molecular Cloning: A Laboratory Manual, Cold Spring Harbor Press (1989). The recombinant AAV vector is then transfected into packaging cells which are infected with a helper virus, using any standard technique, including lipofection, electroporation, calcium phosphate precipitation, etc. Appropriate helper viruses include adenoviruses, cytomegaloviruses, vaccinia viruses, or herpes viruses. Once the packaging cells are transfected and infected, they will produce infectious AAV viral particles which contain the polynucleotide construct. These viral particles are then used to transduce eukaryotic cells, either ex vivo or in vivo. The transduced cells will contain the polynucleotide construct integrated into its genome, and will express a polypeptide of the invention.

[0465] Another method of gene therapy involves operably associating heterologous control regions and endogenous polynucleotide sequences (e.g. encoding a polypeptide of the present invention) via homologous recombination (see, e.g., U.S. Pat. No. 5,641,670, issued June 24, 1997; International Publication No. WO 96/29411, published September 26, 1996; International Publication No. WO 94/12650, published August 4, 1994; Koller et al., Proc. Natl. Acad. Sci. USA 86:8932-8935 (1989); and Zijlstra et al., Nature 342:435-438 (1989), which are herein encorporated by reference. This method involves the activation of a gene which is present in the target cells, but which is not normally expressed in the cells, or is expressed at a lower level than desired.

[0466] Polynucleotide constructs are made, using standard techniques known in the art, which contain the promoter with targeting sequences flanking the promoter. Suitable promoters are described herein. The targeting sequence is sufficiently complementary to an endogenous sequence to permit homologous recombination of the promoter-targeting sequence with the endogenous sequence. The targeting sequence will be sufficiently near the 5′ end of the desired endogenous polynucleotide sequence so the promoter will be operably linked to the endogenous sequence upon homologous recombination.

[0467] The promoter and the targeting sequences can be amplified using PCR. Preferably, the amplified promoter contains distinct restriction enzyme sites on the 5′ and 3′ ends. Preferably, the 3′ end of the first targeting sequence contains the same restriction enzyme site as the 5′ end of the amplified promoter and the 5′ end of the second targeting sequence contains the same restriction site as the 3′ end of the amplified promoter. The amplified promoter and targeting sequences are digested and ligated together.

[0468] The promoter-targeting sequence construct is delivered to the cells, either as naked polynucleotide, or in conjunction with transfection-facilitating agents, such as liposomes, viral sequences, viral particles, whole viruses, lipofection, precipitating agents, etc., described in more detail above. The P promoter-targeting sequence can be delivered by any method, included direct needle injection, intravenous injection, topical administration, catheter infusion, particle accelerators, etc. The methods are described in more detail below.

[0469] The promoter-targeting sequence construct is taken up by cells. Homologous recombination between the construct and the endogenous sequence takes place, such that an endogenous sequence is placed under the control of the promoter. The promoter then drives the expression of the endogenous sequence.

[0470] The polynucleotide encoding a polypeptide of the present invention may contain a secretory signal sequence that facilitates secretion of the protein. Typically, the signal sequence is positioned in the coding region of the polynucleotide to be expressed towards or at the 5′ end of the coding region. The signal sequence may be homologous or heterologous to the polynucleotide of interest and may be homologous or heterologous to the cells to be transfected. Additionally, the signal sequence may be chemically synthesized using methods known in the art.

[0471] Any mode of administration of any of the above-described polynucleotides constructs can be used so long as the mode results in the expression of one or more molecules in an amount sufficient to provide a therapeutic effect. This includes direct needle injection, systemic injection, catheter infusion, biolistic injectors, particle accelerators (i.e., “gene guns”), gelfoam sponge depots, other commercially available depot materials, osmotic pumps (e.g., Alza minipumps), oral or suppositorial solid (tablet or pill) pharmaceutical formulations, and decanting or topical applications during surgery. For example, direct injection of naked calcium phosphate-precipitated plasmid into rat liver and rat spleen or a protein-coated plasmid into the portal yein has resulted in gene expression of the foreign gene in the rat livers (Kaneda et al., Science 243:375 (1989)).

[0472] A preferred method of local administration is by direct injection. Preferably, a recombinant molecule of the present invention complexed with a delivery vehicle is administered by direct injection into or locally within the area of arteries. Administration of a composition locally within the area of arteries refers to injecting the composition centimeters and preferably, millimeters within arteries.

[0473] Another method of local administration is to contact a polynucleotide construct of the present invention in or around a surgical wound. For example, a patient can undergo surgery and the polynucleotide construct can be coated on the surface of tissue inside the wound or the construct can be injected into areas of tissue inside the wound.

[0474] Therapeutic compositions useful in systemic administration, include recombinant molecules of the present invention complexed to a targeted delivery vehicle of the present invention. Suitable delivery vehicles for use with systemic administration comprise liposomes comprising ligands for targeting the vehicle to a particular site. In specific embodiments, suitable delivery vehicles for use with systemic administration comprise liposomes comprising polypeptides of the invention for targeting the vehicle to a particular site.

[0475] Preferred methods of systemic administration, include intravenous injection, aerosol, oral and percutaneous (topical) delivery. Intravenous injections can be performed using methods standard in the art. Aerosol delivery can also be performed using methods standard in the art (see, for example, Stribling et al., Proc. Natl. Acad. Sci. USA 189:11277-11281, 1992, which is incorporated herein by reference). Oral delivery can be performed by complexing a polynucleotide construct of the present invention to a carrier capable of withstanding degradation by digestive enzymes in the gut of an animal. Examples of such carriers, include plastic capsules or tablets, such as those known in the art. Topical delivery can be performed by mixing a polynucleotide construct of the present invention with a lipophilic reagent (e.g., DMSO) that is capable of passing into the skin.

[0476] Determining an effective amount of substance to be delivered can depend upon a number of factors including, for example, the chemical structure and biological activity of the substance, the age and weight of the animal, the precise condition requiring treatment and its severity, and the route of administration. The frequency of treatments depends upon a number of factors, such as the amount of polynucleotide constructs administered per dose, as well as the health and history of the subject. The precise amount, number of doses, and timing of doses will be determined by the attending physician or veterinarian.

[0477] Therapeutic compositions of the present invention can be administered to any animal, preferably to mammals and birds. Preferred mammals include humans, dogs, cats, mice, rats, rabbits sheep, cattle, horses and pigs, with humans being particularly preferred.

[0478] Biological Activities

[0479] Polynucleotides or polypeptides, or agonists or antagonists of the present invention, can be used in assays to test for one or more biological activities. If these polynucleotides or polypeptides, or agonists or antagonists of the present invention, do exhibit activity in a particular assay, it is likely that these molecules may be involved in the diseases associated with the biological activity. Thus, the polynucleotides and polypeptides, and agonists or antagonists could be used to diagnose, prognose, prevent and/or treat the associated disease.

[0480] DNA binding proteins are believed to be involved in biological activities associated with gene expression, regulation of extracellular matrix degradation, and DNA folding. Accordingly, compositions of the invention (including polynucleotides, polypeptides and antibodies of the invention, and fragments and variants thereof) may be used in the diagnosis, prognosis, prevention, and/or treatment of diseases and/or disorders associated with aberrant DNA binding protein activity.

[0481] In preferred embodiments, compositions of the invention (including polynucleotides, polypeptides and antibodies of the invention, and fragments and variants thereof) may be used in the diagnosis, prognosis, prevention, and/or treatment of diseases and/or disorders relating to neoplastic diseases (e.g., renal cell carcinoma, ovarian serous adenocarcinoma, colorectal carcinomas, extracellular matrix turnover, and/or as described under “Hyperproliferative Disorders” below), viral gene expression (e.g., HIV, hepatitis C, and/or as described under “Infectious Diseases” below), immune responses (e.g., regulation of MHC class proteins, inflammatory responses, and/or as described under “Immune Disorders” below), neural dysfunction (e.g., neurotransmitter synthesis, channel regulation, Alzheimer's disease, and/or as described under “Neural Activity and Neurological Disorders” below), digestive disorders (e.g., chronic liver diseases, intestinal absorption, and/or as described under “Gastrointestinal Disorders” below), and diseases of cellular functions (e.g., polycythemia vera, lymphangioendotheliosarcoma, and/or as described under “Diseases at the Cellular Level” below).

[0482] In certain embodiments, a polypeptide of the invention, or polynucleotides, antibodies, agonists, or antagonists corresponding to that polypeptide, may be used to diagnose and/or prognose diseases and/or disorders associated with the tissue(s) in which the polypeptide of the invention is expressed, including one, two, three, four, five, or more tissues disclosed in Table 1A, column 8 (Tissue Distribution Library Code).

[0483] Thus, polynucleotides, translation products and antibodies of the invention are useful in the diagnosis, prognosis, prevention, and/or treatment of diseases and/or disorders associated with activities that include, but are not limited to, neoplastic disorders, autoimmune disorders, rheumatic diseases, genetic abnormalities, infectious diseases, and neurological disorders.

[0484] More generally, polynucleotides, translation products and antibodies corresponding to this gene may be useful for the diagnosis, prognosis, prevention, and/or treatment of diseases and/or disorders associated with the following systems.

[0485] Immune Activity

[0486] Polynucleotides, polypeptides, antibodies, and/or agonists or antagonists of the present invention may be useful in treating, preventing, diagnosing and/or prognosing diseases, disorders, and/or conditions of the immune system, by, for example, activating or inhibiting the proliferation, differentiation, or mobilization (chemotaxis) of immune cells. Immune cells develop through a process called hematopoiesis, producing myeloid (platelets, red blood cells, neutrophils, and macrophages) and lymphoid (B and T lymphocytes) cells from pluripotent stem cells. The etiology of these immune diseases, disorders, and/or conditions may be genetic, somatic, such as cancer and some autoimmune diseases, acquired (e.g., by chemotherapy or toxins), or infectious. Moreover, polynucleotides, polypeptides, antibodies, and/or agonists or antagonists of the present invention can be used as a marker or detector of a particular immune system disease or disorder.

[0487] In another embodiment, a polypeptide of the invention, or polynucleotides, antibodies, agonists, or antagonists corresponding to that polypeptide, may be used to treat diseases and disorders of the immune system and/or to inhibit or enhance an immune response generated by cells associated with the tissue(s) in which the polypeptide of the invention is expressed, including one, two, three, four, five, or more tissues disclosed in Table 1A, column 8 (Tissue Distribution Library Code).

[0488] Polynucleotides, polypeptides, antibodies, and/or agonists or antagonists of the present invention may be useful in treating, preventing, diagnosing, and/or prognosing immunodeficiencies, including both congenital and acquired immunodeficiencies. Examples of B cell immunodeficiencies in which immunoglobulin levels B cell function and/or B cell numbers are decreased include: X-linked agammaglobulinemia (Bruton's disease), X-linked infantile agammaglobulinemia, X-linked immunodeficiency with hyper IgM, non X-linked immunodeficiency with hyper IgM, X-linked lymphoproliferative syndrome (XLP), agammaglobulinemia including congenital and acquired agammaglobulinemia, adult onset agammaglobulinemia, late-onset agammaglobulinemia, dysgammaglobulinemia, hypogammaglobulinemia, unspecified hypogammaglobulinemia, recessive agammaglobulinemia (Swiss type), Selective IgM deficiency, selective IgA deficiency, selective IgG subclass deficiencies, IgG subclass deficiency (with or without IgA deficiency), Ig deficiency with increased IgM, IgG and IgA deficiency with increased IgM, antibody deficiency with normal or elevated Igs, Ig heavy chain deletions, kappa chain deficiency, B cell lymphoproliferative disorder (BLPD), common variable immunodeficiency (CVID), common variable immunodeficiency (CVI) (acquired), and transient hypogammaglobulinemia of infancy.

[0489] In specific embodiments, ataxia-telangiectasia or conditions associated with ataxia-telangiectasia are treated, prevented, diagnosed, and/or prognosing using the polypeptides or polynucleotides of the invention, and/or agonists or antagonists thereof.

[0490] Examples of congenital immunodeficiencies in which T cell and/or B cell function and/or number is decreased include, but are not limited to: DiGeorge anomaly, severe combined immunodeficiencies (SCID) (including, but not limited to, X-linked SCID, autosomal recessive SCID, adenosine deaminase deficiency, purine nucleoside phosphorylase (PNP) deficiency, Class II MHC deficiency (Bare lymphocyte syndrome), Wiskott-Aldrich syndrome, and ataxia telangiectasia), thymic hypoplasia, third and fourth pharyngeal pouch syndrome, 22q11.2 deletion, chronic mucocutaneous candidiasis, natural killer cell deficiency (NK), idiopathic CD4+ T-lymphocytopenia, immunodeficiency with predominant T cell defect (unspecified), and unspecified immunodeficiency of cell mediated immunity.

[0491] In specific embodiments, DiGeorge anomaly or conditions associated with DiGeorge anomaly are treated, prevented, diagnosed, and/or prognosed using polypeptides or polynucleotides of the invention, or antagonists or agonists thereof.

[0492] Other immunodeficiencies that may be treated, prevented, diagnosed, and/or prognosed using polypeptides or polynucleotides of the invention, and/or agonists or antagonists thereof, include, but are not limited to, chronic granulomatous disease, Chediak-Higashi syndrome, myeloperoxidase deficiency, leukocyte glucose-6-phosphate dehydrogenase deficiency, X-linked lymphoproliferative syndrome (XLP), leukocyte adhesion deficiency, complement component, deficiencies (including C1, C2, C3, C4, C5, C6, C7, C8 and/or C9 deficiencies), reticular dysgenesis, thymic alymphoplasia-aplasia, immunodeficiency with thymoma, severe congenital leukopenia, dysplasia with immunodeficiency, neonatal neutropenia, short limbed dwarfism, and Nezelof syndrome-combined immunodeficiency with Igs.

[0493] In a preferred embodiment, the immunodeficiencies and/or conditions associated with the immunodeficiencies recited above are treated, prevented, diagnosed and/or prognosed using polynucleotides, polypeptides, antibodies, and/or agonists or antagonists of the present invention.

[0494] In a preferred embodiment polynucleotides, polypeptides, antibodies, and/or agonists or antagonists of the present invention could be used as an agent to boost immunoresponsiveness among immunodeficient individuals. In specific embodiments, polynucleotides, polypeptides, antibodies, and/or agonists or antagonists of the present invention could be used as an agent to boost immunoresponsiveness among B cell and/or T cell immunodeficient individuals.

[0495] The polynucleotides, polypeptides, antibodies, and/or agonists or antagonists of the present invention may be useful in treating, preventing, diagnosing and/or prognosing autoimmune disorders. Many autoimmune disorders result from inappropriate recognition of self as foreign material by immune cells. This inappropriate recognition results in an immune response leading to the destruction of the host tissue. Therefore, the administration of polynucleotides and polypeptides of the invention that can inhibit an immune response, particularly the proliferation, differentiation, or chemotaxis of T-cells, may be an effective therapy in preventing autoimmune disorders.

[0496] Autoimmune diseases or disorders that may be treated, prevented, diagnosed and/or prognosed by polynucleotides, polypeptides, antibodies, and/or agonists or antagonists of the present invention include, but are not limited to, one or more of the following: systemic lupus erythematosus, rheumatoid arthritis, ankylosing spondylitis, multiple sclerosis, autoimmune thyroiditis, Hashimoto's thyroiditis, autoimmune hemolytic anemia, hemolytic anemia, thrombocytopenia, autoimmune thrombocytopenia purpura, autoimmune neonatal thrombocytopenia, idiopathic thrombocytopenia purpura, purpura (e.g., Henloch-Scoenlein purpura), autoimmunocytopenia, Goodpasture's syndrome, Pemphigus vulgaris, myasthenia gravis, Grave's disease (hyperthyroidism), and insulin-resistant diabetes mellitus.

[0497] Additional disorders that are likely to have an autoimmune component that may be treated, prevented, and/or diagnosed with the compositions of the invention include, but are not limited to, type II collagen-induced arthritis, antiphospholipid syndrome, dermatitis, allergic encephalomyelitis, myocarditis, relapsing polychondritis, rheumatic heart disease, neuritis, uveitis ophthalmia, polyendocrinopathies, Reiter's Disease, Stiff-Man Syndrome, autoimmune pulmonary inflammation, autism, Guillain-Barre Syndrome, insulin dependent diabetes mellitus, and autoimmune inflammatory eye disorders.

[0498] Additional disorders that are likely to have an autoimmune component that may be treated, prevented, diagnosed and/or prognosed with the compositions of the invention include, but are not limited to, scleroderma with anti-collagen antibodies (often characterized, e.g., by nucleolar and other nuclear antibodies), mixed connective tissue disease (often characterized, e.g., by antibodies to extractable nuclear antigens (e.g., ribonucleoprotein)), polymyositis (often characterized, e.g., by nonhistone ANA), pernicious anemia (often characterized, e.g., by antiparietal cell, microsomes, and intrinsic factor antibodies), idiopathic Addison's disease (often characterized, e.g., by humoral and cell-mediated adrenal cytotoxicity, infertility (often characterized, e.g., by antispermatozoal antibodies), glomerulonephritis (often characterized, e.g., by glomerular basement membrane antibodies or immune complexes), bullous pemphigoid (often characterized, e.g., by IgG and complement in basement membrane), Sjogren's syndrome (often characterized, e.g., by multiple'tissue antibodies, and/or a specific nonhistone ANA (SS-B)), diabetes mellitus (often characterized, e.g., by cell-mediated and humoral islet cell antibodies), and adrenergic drug resistance (including adrenergic drug resistance with asthma or cystic fibrosis) (often characterized, e.g., by beta-adrenergic receptor antibodies).

[0499] Additional disorders that may have an autoimmune component that may be treated, prevented, diagnosed and/or prognosed with the compositions of the invention include, but are not limited to, chronic active hepatitis (often characterized, e.g., by smooth muscle antibodies), primary biliary cirrhosis (often characterized, e.g., by mitochondria antibodies), other endocrine gland failure (often characterized, e.g., by specific tissue antibodies in some cases), vitiligo (often characterized, e.g., by melanocyte antibodies), vasculitis (often characterized, e.g., by Ig and complement in vessel walls and/or low serum complement), post-MI (often characterized, e.g., by myocardial antibodies), cardiotomy syndrome (often characterized, e.g., by myocardial antibodies), urticaria (often characterized, e.g., by IgG and IgM antibodies to IgE), atopic dermatitis (often characterized, e.g., by IgG and IgM antibodies to IgE), asthma (often characterized, e.g., by IgG and IgM antibodies to IgE), and many other inflammatory, granulomatous, degenerative, and atrophic disorders.

[0500] In a preferred embodiment, the autoimmune diseases and disorders and/or conditions associated with the diseases and disorders recited above are treated, prevented, diagnosed and/or prognosed using for example, antagonists or agonists, polypeptides or polynucleotides, or antibodies of the present invention. In a specific preferred embodiment, rheumatoid arthritis is treated, prevented, and/or diagnosed using polynucleotides, polypeptides, antibodies, and/or agonists or antagonists of the present invention.

[0501] In another specific preferred embodiment, systemic lupus erythematosus is treated, prevented, and/or diagnosed using polynucleotides, polypeptides, antibodies, and/or agonists or antagonists of the present invention. In another specific preferred embodiment, idiopathic thrombocytopenia purpura is treated, prevented, and/or diagnosed using polynucleotides, polypeptides, antibodies, and/or agonists or antagonists of the present invention.

[0502] In another specific preferred embodiment IgA nephropathy is treated, prevented, and/or diagnosed using polynucleotides, polypeptides, antibodies, and/or agonists or antagonists of the present invention.

[0503] In a preferred embodiment, the autoimmune diseases and disorders and/or conditions associated with the diseases and disorders recited above are treated, prevented, diagnosed and/or prognosed using polynucleotides, polypeptides, antibodies, and/or agonists or antagonists of the present invention

[0504] In preferred embodiments, polypeptides, antibodies, polynucleotides and/or agonists- or antagonists of the present invention are used as a immunosuppressive agent(s).

[0505] Polynucleotides, polypeptides, antibodies, and/or agonists or antagonists of the present invention may be useful in treating, preventing, prognosing, and/or diagnosing diseases, disorders, and/or conditions of hematopoietic cells. Polynucleotides, polypeptides, antibodies, and/or agonists or antagonists of the present invention could be used to increase differentiation and proliferation of hematopoietic cells, including the pluripotent stem cells, in an effort to treat or prevent those diseases, disorders, and/or conditions associated with a decrease in certain (or many) types hematopoietic cells, including but not limited to, leukopenia, neutropenia, anemia, and thrombocytopenia. Alternatively, Polynucleotides, polypeptides, antibodies, and/or agonists or antagonists of the present invention could be used to increase differentiation and proliferation of hematopoietic cells, including the pluripotent stem cells, in an effort to treat or prevent those diseases, disorders, and/or conditions associated with an increase in certain (or many) types of hematopoietic cells, including but not limited to, histiocytosis.

[0506] Allergic reactions and conditions, such as asthma (particularly allergic asthma) or other respiratory problems, may also be treated, prevented, diagnosed and/or prognosed using polypeptides, antibodies, or polynucleotides of the invention, and/or agonists or antagonists thereof. Moreover, these molecules can be used to treat, prevent, prognose, and/or diagnose anaphylaxis, hypersensitivity to an antigenic molecule, or blood group incompatibility.

[0507] Additionally, polypeptides or polynucleotides of the invention, and/or agonists or antagonists thereof, may be used to treat, prevent, diagnose and/or prognose IgE-mediated allergic reactions. Such allergic reactions include, but are not limited to, asthma, rhinitis, and eczema. In specific embodiments, polynucleotides, polypeptides, antibodies, and/or agonists or antagonists of the present invention may be used to modulate IgE concentrations in vitro or in vivo.

[0508] Moreover, polynucleotides, polypeptides, antibodies, and/or agonists or antagonists of the present invention have uses in the diagnosis, prognosis, prevention, and/or treatment of inflammatory conditions. For example, since polypeptides, antibodies, or polynucleotides of the invention, and/or agonists or antagonists of the invention may inhibit the activation, proliferation and/or differentiation of cells involved in an inflammatory response, these molecules can be used to prevent and/or treat chronic and acute inflammatory conditions. Such inflammatory conditions include, but are not limited to, for example, inflammation associated with infection (e.g., septic shock, sepsis, or systemic inflammatory response syndrome), ischemia-reperfusion injury, endotoxin lethality, complement-mediated hyperacute rejection, nephritis, cytokine or chemokine induced lung injury, inflammatory bowel disease, Crohn's disease, over production of cytokines (e.g., TNF or IL-1.), respiratory disorders (e.g., asthma and allergy); gastrointestinal disorders (e.g., inflammatory bowel disease); cancers (e.g., gastric, ovarian, lung, bladder, liver, and breast); CNS disorders (e.g., multiple sclerosis; ischemic brain injury and/or stroke, traumatic brain injury, neurodegenerative disorders (e.g., Parkinson's disease and Alzheimer's disease); AIDS-related dementia; and prion disease); cardiovascular disorders (e.g., atherosclerosis, myocarditis, cardiovascular disease, and cardiopulmonary bypass complications); as well as many additional diseases, conditions, and disorders that are characterized by inflammation (e.g., hepatitis, rheumatoid arthritis, gout, trauma, pancreatitis, sarcoidosis, dermatitis, renal ischemia-reperfusion injury, Grave's disease, systemic lupus erythematosus, diabetes mellitus, and allogenic transplant rejection).

[0509] Because inflammation is a fundamental defense mechanism, inflammatory disorders can effect virtually any tissue of the body. Accordingly, polynucleotides, polypeptides, and antibodies of the invention, as well as agonists or antagonists thereof, have uses in the treatment of tissue-specific inflammatory disorders, including, but not limited to, adrenalitis, alveolitis, angiocholecystitis, appendicitis, balanitis, blepharitis, bronchitis, bursitis, carditis, cellulitis, cervicitis, cholecystitis, chorditis, cochlitis, colitis, conjunctivitis, cystitis, dermatitis, diverticulitis, encephalitis, endocarditis, esophagitis, eustachitis, fibrositis, folliculitis, gastritis, gastroenteritis, gingivitis, glossitis, hepatosplenitis, keratitis, labyrinthitis, laryngitis, lymphangitis, mastitis, media otitis, meningitis, metritis, mucitis, myocarditis, myosititis, myringitis, nephritis, neuritis, orchitis, osteochondritis, otitis, pericarditis, peritendonitis, peritonitis, pharyngitis, phlebitis, poliomyelitis, prostatitis, pulpitis, retinitis, rhinitis, salpingitis, scleritis, sclerochoroiditis, scrotitis, sinusitis, spondylitis, steatitis, stomatitis, synovitis, syringitis, tendonitis, tonsillitis, urethritis, and vaginitis.

[0510] In specific embodiments, polypeptides, antibodies, or polynucleotides of the invention, and/or agonists or antagonists thereof, are useful to diagnose, prognose, prevent, and/or treat organ transplant rejections and graft-versus-host disease. Organ rejection occurs by host immune cell destruction of the transplanted tissue through an immune response. Similarly, an immune response is also involved in GVHD, but, in this case, the foreign transplanted immune cells destroy the host tissues. Polypeptides, antibodies, or polynucleotides of the invention, and/or agonists or antagonists thereof, that inhibit an immune response, particularly the activation, proliferation, differentiation, or chemotaxis of T-cells, may be an effective therapy in preventing organ rejection or GVHD. In specific embodiments, polypeptides, antibodies, or polynucleotides of the invention, and/or agonists or antagonists thereof, that inhibit an immune response, particularly the activation, proliferation, differentiation, or chemotaxis of T-cells, may be an effective therapy in preventing experimental allergic and hyperacute xenograft rejection.

[0511] In other embodiments, polypeptides, antibodies, or polynucleotides of the invention, and/or agonists or antagonists thereof, are useful to diagnose, prognose, prevent, and/or treat immune complex diseases, including, but not limited to, serum sickness, post streptococcal glomerulonephritis, polyarteritis nodosa, and immune complex-induced vasculitis.

[0512] Polypeptides, antibodies, polynucleotides and/or agonists or antagonists of the invention can be used to treat, detect, and/or prevent infectious agents. For example, by increasing the immune response, particularly increasing the proliferation activation and/or differentiation of B and/or T cells, infectious diseases may be treated, detected, and/or prevented. The immune response may be increased by either enhancing an existing immune response, or by initiating a new immune response. Alternatively, polynucleotides, polypeptides, antibodies, and/or agonists or antagonists of the present invention may also directly inhibit the infectious agent (refer to section of application listing infectious agents, etc), without necessarily eliciting an immune response.

[0513] In another embodiment, polypeptides, antibodies, polynucleotides and/or agonists or antagonists of the present invention are used as a vaccine adjuvant that enhances immune responsiveness to an antigen. In a specific embodiment, polypeptides, antibodies, polynucleotides and/or agonists or antagonists of the present invention are used as an adjuvant to enhance tumor-specific immune responses.

[0514] In another specific embodiment, polypeptides, antibodies, polynucleotides and/or agonists or antagonists of the present invention are used as an adjuvant to enhance anti-viral immune responses. Anti-viral immune responses that may be enhanced using the compositions of the invention as an adjuvant, include virus and virus associated diseases or symptoms described herein or otherwise known in the art. In specific embodiments, the compositions of the invention are used as an adjuvant to enhance an immune response to a virus, disease, or symptom selected from the group consisting of: AIDS, meningitis, Dengue, EBV, and hepatitis (e.g., hepatitis B). In another specific embodiment, the compositions of the invention are used as an adjuvant to enhance an immune response to a virus, disease, or symptom selected from the group consisting of: HIV/AIDS, respiratory syncytial virus, Dengue, rotavirus, Japanese B encephalitis, influenza A and B, parainfluenza, measles, cytomegalovirus, rabies, Junin, Chikungunya, Rift Valley Fever, herpes simplex, and yellow fever.

[0515] In another specific embodiment, polypeptides, antibodies, polynucleotides and/or agonists or antagonists of the present invention are used as an adjuvant to enhance anti-bacterial or anti-fungal immune responses. Anti-bacterial or anti-fungal immune responses that may be enhanced using the compositions of the invention as an adjuvant, include bacteria or fungus and bacteria or fungus associated diseases or symptoms described herein or otherwise known in the art. In specific embodiments, the compositions of the invention are used as an adjuvant to enhance an immune response to a bacteria or fungus, disease, or symptom selected from the group consisting of: tetanus, Diphtheria, botulism, and meningitis type B.

[0516] In another specific embodiment, the compositions of the invention are used as an adjuvant to enhance an immune response to a bacteria or fungus, disease, or symptom selected from the group consisting of: Vibrio cholerae, Mycobacterium leprae, Salmonella typhi, Salmonella paratyphi, Meisseria meningitidis, Streptococcus pneumoniae, Group B streptococcus, Shigella spp., Enterotoxigenic Escherichia coli, Enterohemorrhagic E. coli, and Borrelia burgdorferi.

[0517] In another specific embodiment, polypeptides, antibodies, polynucleotides and/or agonists or antagonists of the present invention are used as an adjuvant to enhance anti-parasitic immune responses. Anti-parasitic immune responses that may be enhanced using the compositions of the invention as an adjuvant, include parasite and parasite associated diseases or symptoms described herein or otherwise known in the art. In specific embodiments, the compositions of the invention are used as an adjuvant to enhance an immune response to a parasite. In another specific embodiment, the compositions of the invention are used as an adjuvant to enhance an immune response to Plasmodium (malaria) or Leishmania.

[0518] In another specific embodiment, polypeptides, antibodies, polynucleotides and/or agonists or antagonists of the present invention may also be employed to treat infectious diseases including silicosis, sarcoidosis, and idiopathic pulmonary fibrosis; for example, by preventing the recruitment and activation of mononuclear phagocytes.

[0519] In another specific embodiment, polypeptides, antibodies, polynucleotides and/or agonists or antagonists of the present invention are used as an antigen for the generation of antibodies to inhibit or enhance immune mediated responses against polypeptides of the invention.

[0520] In one embodiment, polypeptides, antibodies, polynucleotides and/or agonists or antagonists of the present invention are administered to an animal (e.g., mouse, rat, rabbit, hamster, guinea pig, pigs, micro-pig, chicken, camel, goat, horse, cow, sheep, dog, cat, non-human primate, and human, most preferably human) to boost the immune system to produce increased quantities of one or more antibodies (e.g., IgG, IgA, IgM, and IgE), to induce higher affinity antibody production and immunoglobulin class switching (e.g., IgG, IgA, IgM, and IgE), and/or to increase an immune response.

[0521] In another specific embodiment, polypeptides, antibodies, polynucleotides and/or agonists or antagonists of the present invention are used as a stimulator of B cell responsiveness to pathogens.

[0522] In another specific embodiment, polypeptides, antibodies, polynucleotides and/or agonists or antagonists of the present invention are used as an activator of T cells.

[0523] In another specific embodiment, polypeptides, antibodies, polynucleotides and/or agonists or antagonists of the present invention are used as an agent that elevates the immune status of an individual prior to their receipt of immunosuppressive therapies.

[0524] In another specific embodiment, polypeptides, antibodies, polynucleotides and/or agonists or antagonists of the present invention are used as an agent to induce higher affinity antibodies.

[0525] In another specific embodiment, polypeptides, antibodies, polynucleotides and/or agonists or antagonists of the present invention are used as an agent to increase serum immunoglobulin concentrations.

[0526] In another specific embodiment, polypeptides, antibodies, polynucleotides and/or agonists or antagonists of the present invention are used as an agent to accelerate recovery of immunocompromised individuals.

[0527] In another specific embodiment, polypeptides, antibodies, polynucleotides and/or agonists or antagonists of the present invention are used as an agent to boost immunoresponsiveness among aged populations and/or neonates.

[0528] In another specific embodiment, polypeptides, antibodies, polynucleotides and/or agonists or antagonists of the present invention are used as an immune system enhancer prior to, during, or after bone marrow transplant and/or other transplants (e.g., allogeneic or xenogeneic organ transplantation). With respect to transplantation, compositions of the invention may be administered prior to, concomitant with, and/or after transplantation. In a specific embodiment, compositions of the invention are administered after transplantation, prior to the beginning of recovery of T-cell populations. In another specific embodiment, compositions of the invention are first administered after transplantation after the beginning of recovery of T cell populations, but prior to full recovery of B cell populations.

[0529] In another specific embodiment, polypeptides, antibodies, polynucleotides and/or agonists or antagonists of the present invention are used as an agent to boost immunoresponsiveness among individuals having an acquired loss of B cell function. Conditions resulting in an acquired loss of B cell function that may be ameliorated or treated by administering the polypeptides, antibodies, polynucleotides and/or agonists or antagonists thereof, include, but are not limited to, HIV Infection, AIDS, bone marrow transplant, and B cell chronic lymphocytic leukemia (CLL).

[0530] In another specific embodiment, polypeptides, antibodies, polynucleotides and/or agonists or antagonists of the present invention are used as an agent to boost immunoresponsiveness among individuals having a temporary immune deficiency. Conditions resulting in a temporary immune deficiency that may be ameliorated or treated by administering the polypeptides, antibodies, polynucleotides and/or agonists or antagonists thereof, include, but are not limited to, recovery from viral infections (e.g., influenza), conditions associated with malnutrition, recovery from infectious mononucleosis, or conditions associated with stress, recovery from measles, recovery from blood transfusion, and recovery from surgery.

[0531] In another specific embodiment, polypeptides, antibodies, polynucleotides and/or agonists or antagonists of the present invention are used as a regulator of antigen presentation by monocytes, dendritic cells, and/or ,B-cells. In one embodiment, polynucleotides, polypeptides, antibodies, and/or agonists or antagonists of the present invention enhance antigen presentation or antagonizes antigen presentation in vitro or in vivo. Moreover, in related embodiments, said enhancement or antagonism of antigen presentation may be useful as an anti-tumor treatment or to modulate the immune system.

[0532] In another specific embodiment, polypeptides, antibodies, polynucleotides and/or agonists or antagonists of the present invention are used as an agent to direct an individual's immune system towards development of a humoral response (i.e. TH2) as opposed to a TH1 cellular response.

[0533] In another specific embodiment, polypeptides, antibodies, polynucleotides and/or agonists or antagonists of the present invention are used as a means to induce tumor proliferation and thus make it more susceptible to anti-neoplastic agents. For example, multiple myeloma is a slowly dividing disease and is thus refractory to virtually all anti-neoplastic regimens. If these cells were forced to proliferate more rapidly their susceptibility profile would likely change.

[0534] In another specific embodiment, polypeptides, antibodies, polynucleotides and/or agonists or antagonists of the present invention are used as a stimulator of B cell production in pathologies such as AIDS, chronic lymphocyte disorder and/or Common Variable Immunodificiency.

[0535] In another specific embodiment, polypeptides, antibodies, polynucleotides and/or agonists or antagonists of the present invention are used as a therapy for generation and/or regeneration of lymphoid tissues following surgery, trauma or genetic defect. In another specific embodiment, polypeptides, antibodies, polynucleotides and/or agonists or antagonists of the present invention are used in the pretreatment of bone marrow samples prior to transplant.

[0536] In another specific embodiment, polypeptides, antibodies, polynucleotides and/or agonists or antagonists of the present invention are used as a gene-based therapy for genetically inherited disorders resulting in immuno-incompetence/immunodeficiency such as observed among SCID patients.

[0537] In another specific embodiment, polypeptides, antibodies, polynucleotides and/or agonists or antagonists of the present invention are used as a means of activating monocytes/macrophages to defend against parasitic diseases that effect monocytes such as Leishmania.

[0538] In another specific embodiment, polypeptides, antibodies, polynucleotides and/or agonists or antagonists of the present invention are used as a means of regulating secreted cytokines that are elicited by polypeptides of the invention.

[0539] In another embodiment, polypeptides, antibodies, polynucleotides and/or agonists or antagonists of the present invention are used in one or more of the applications decribed herein, as they may apply to veterinary medicine.

[0540] In another specific embodiment, polypeptides, antibodies, polynucleotides and/or agonists or antagonists of the present invention are used as a means of blocking various aspects of immune responses to foreign agents or self. Examples of diseases or conditions in which blocking of certain aspects of immune responses may be desired include autoimmune disorders such as lupus, and arthritis, as well as immunoresponsiveness to skin allergies, inflammation, bowel disease, injury and diseases/disorders associated with pathogens.

[0541] In another specific embodiment, polypeptides, antibodies, polynucleotides and/or agonists or antagonists of the present invention are used as a therapy for preventing the B cell proliferation and Ig secretion associated with autoimmune diseases such as idiopathic thrombocytopenic purpura, systemic lupus erythematosus and multiple sclerosis.

[0542] In another specific embodiment, polypeptides, antibodies, polynucleotides and/or agonists or antagonists of the present invention are used as a inhibitor of B and/or T cell migration in-endothelial cells. This activity disrupts tissue architecture or cognate responses and is useful, for example in disrupting immune responses, and blocking sepsis.

[0543] In another specific embodiment, polypeptides, antibodies, polynucleotides and/or agonists or antagonists of the present invention are used as a therapy for chronic hypergammaglobulinemia evident in such diseases as monoclonal gammopathy of undetermined significance (MGUS), Waldenstrom's disease, related idiopathic monoclonal gammopathies, and plasmacytomas.

[0544] In another specific embodiment, polypeptides, antibodies, polynucleotides and/or agonists or antagonists of the present invention may be employed for instance to inhibit polypeptide chemotaxis and activation of macrophages and their precursors, and of neutrophils, basophils, B lymphocytes and some T-cell subsets, e.g., activated and CD8 cytotoxic T cells and natural killer cells, in certain autoimmune and chronic inflammatory and infective diseases. Examples of autoimmune diseases are described herein and include multiple sclerosis, and insulin-dependent diabetes.

[0545] The polypeptides, antibodies, polynucleotides and/or agonists or antagonists of the present invention may also be employed to treat idiopathic hyper-eosinophilic syndrome by, for example, preventing eosinophil production and migration.

[0546] In another specific embodiment, polypeptides, antibodies, polynucleotides and/or agonists or antagonists of the present invention are used to enhance or inhibit complement mediated cell lysis.

[0547] In another specific embodiment, polypeptides, antibodies, polynucleotides and/or agonists or antagonists of the present invention are used to enhance or inhibit antibody dependent cellular cytotoxicity.

[0548] In another specific embodiment, polypeptides, antibodies, polynucleotides and/or agonists or antagonists of the present invention may also be employed for treating atherosclerosis, for example, by preventing monocyte infiltration in the artery wall.

[0549] In another specific embodiment, polypeptides, antibodies, polynucleotides and/or agonists or antagonists of the present invention may be employed to treat adult respiratory distress syndrome (ARDS).

[0550] In another specific embodiment, polypeptides, antibodies, polynucleotides and/or agonists or antagonists of the present invention may be useful for stimulating wound and tissue repair, stimulating angiogenesis, and/or stimulating the repair of vascular or lymphatic diseases or disorders. Additionally, agonists and antagonists of the invention may be used to stimulate the regeneration of mucosal surfaces.

[0551] In a specific embodiment, polynucleotides or polypeptides, and/or agonists thereof are used to diagnose, prognose, treat, and/or prevent a disorder characterized by primary or acquired immunodeficiency, deficient serum immunoglobulin production, recurrent infections, and/or immune system dysfunction. Moreover, polynucleotides or polypeptides, and/or agonists thereof may be used to treat or prevent infections of the joints, bones, skin, and/or parotid glands, blood-borne infections (e.g., sepsis, meningitis, septic arthritis, and/or osteomyelitis), autoimmune diseases (e.g., those disclosed herein), inflammatory disorders, and malignancies, and/or any disease or disorder or condition associated with these infections, diseases, disorders and/or malignancies) including, but not limited to, CVID, other primary immune deficiencies, HIV disease, CLL, recurrent bronchitis, sinusitis, otitis media, conjunctivitis, pneumonia, hepatitis, meningitis, herpes zoster (e.g., severe herpes zoster), and/or pneumocystis camii. Other diseases and disorders that may be prevented, diagnosed, prognosed, and/or treated with polynucleotides or polypeptides, and/or agonists of the present invention include, but are not limited to, HIV infection, HTLV-BLV infection, lymphopenia, phagocyte bactericidal dysfunction anemia, thrombocytopenia, and hemoglobinuria.

[0552] In another embodiment, polynucleotides, polypeptides, antibodies, and/or agonists or antagonists of the present invention are used to treat, and/or diagnose an individual having common variable immunodeficiency disease (“CVID”; also known as “acquired agammaglobulinemia” and “acquired hypogammaglobulinemia”) or a subset of this disease.

[0553] In a specific embodiment, polynucleotides, polypeptides, antibodies, and/or agonists or antagonists of the present invention may be used to diagnose, prognose, prevent, and/or treat cancers or neoplasms including immune cell or immune tissue-related cancers or neoplasms. Examples of cancers or neoplasms that may be prevented, diagnosed, or treated by polynucleotides, polypeptides, antibodies, and/or agonists or antagonists of the present invention include, but are not limited to, acute myelogenous leukemia, chronic myelogenous leukemia, Hodgkin's disease, non-Hodgkin's lymphoma, acute lymphocytic anemia (ALL) Chronic lymphocyte leukemia, plasmacytomas, multiple myeloma, Burkitt's lymphoma, EBV-transformed diseases, and/or diseases and disorders described in the section entitled “Hyperproliferative Disorders” elsewhere herein.

[0554] In another specific embodiment, polypeptides, antibodies, polynucleotides and/or agonists or antagonists of the present invention are used as a therapy for decreasing cellular proliferation of Large B-cell Lymphomas.

[0555] In another specific embodiment, polypeptides, antibodies, polynucleotides and/or agonists or antagonists of the present invention are used as a means of decreasing the involvement of B cells and Ig associated with Chronic Myelogenous Leukemia.

[0556] In specific embodiments, the compositions of the invention are used as an agent to boost immunoresponsiveness among B cell immunodeficient individuals, such as, for example, an individual who has undergone a partial or complete splenectomy.

[0557] Antagonists of the invention include, for example, binding and/or inhibitory antibodies, antisense nucleic acids, ribozymes or soluble forms of the polypeptides of the present invention (e.g., Fc fusion protein; see, e.g., Example 9). Agonists of the invention include, for example, binding or stimulatory antibodies, and soluble forms of the polypeptides (e.g., Fc fusion proteins; see, e.g., Example 9). polypeptides, antibodies, polynucleotides and/or agonists or antagonists of the present invention may be employed in a composition with a pharmaceutically acceptable carrier, e.g., as described herein.

[0558] In another embodiment, polypeptides, antibodies, polynucleotides and/or agonists or antagonists of the present invention are administered to an animal (including, but not limited to, those listed above, and also including transgenic animals) incapable of producing functional endogenous antibody molecules or having an otherwise compromised endogenous immune system, but which is capable of producing human immunoglobulin molecules by means of a reconstituted or partially reconstituted immune system from another animal (see, e.g., published PCT Application Nos. WO98/24893, WO/9634096, WO/9633735, and WO/9110741). Administration of polypeptides, antibodies, polynucleotides and/or agonists or antagonists of the present invention to such animals is useful for the generation of monoclonal antibodies against the polypeptides, antibodies, polynucleotides and/or agonists or antagonists of the present invention.

[0559] Blood-related Disorders

[0560] The polynucleotides, polypeptides, antibodies, and/or agonists or antagonists of the present invention may be used to modulate hemostatic (the stopping of bleeding) or thrombolytic (clot dissolving) activity. For example, by increasing hemostatic or thrombolytic activity, polynucleotides or polypeptides, and/or agonists or antagonists of the present invention could be used to treat or prevent blood coagulation diseases, disorders, and/or conditions (e.g., afibrinogenemia, factor deficiencies, hemophilia), blood platelet diseases, disorders, and/or conditions (e.g., thrombocytopenia), or wounds resulting from trauma, surgery, or other causes. Alternatively, polynucleotides, polypeptides, antibodies, and/or agonists or antagonists of the present invention that can decrease hemostatic or thrombolytic activity could be used to inhibit or dissolve clotting. These molecules could be important in the treatment or prevention of heart attacks (infarction), strokes, or scarring.

[0561] In specific embodiments, the polynucleotides, polypeptides, antibodies, and/or agonists or antagonists of the present invention may be used to prevent, diagnose, prognose, and/or treat thrombosis, arterial thrombosis, venous thrombosis, thromboembolism, pulmonary embolism, atherosclerosis, myocardial infarction, transient ischemic attack, unstable angina. In specific embodiments, the polynucleotides, polypeptides, antibodies, and/or agonists or antagonists of the present invention may be used for the prevention of occulsion of saphenous grafts, for reducing the risk of periprocedural thrombosis as might accompany angioplasty procedures, for reducing the risk of stroke in patients with atrial fibrillation including nonrheumatic atrial fibrillation, for reducing the risk of embolism associated with mechanical heart valves and or mitral valves disease. Other uses for the polynucleotides, polypeptides, antibodies, and/or agonists or antagonists of the present invention, include, but are not limited to, the prevention of occlusions in extrcorporeal devices (e.g., intravascular canulas, vascular access shunts in hemodialysis patients, hemodialysis machines, and cardiopulmonary bypass machines).

[0562] In another embodiment, a polypeptide of the invention, or polynucleotides, antibodies, agonists, or antagonists corresponding to that polypeptide, may be used to prevent, diagnose, prognose, and/or treat diseases and disorders of the blood and/or blood forming organs associated with the tissue(s) in which the polypeptide of the invention is expressed, including one, two, three, four, five, or more tissues disclosed in Table 1A, column 8 (Tissue Distribution Library Code).

[0563] The polynucleotides, polypeptides, antibodies, and/or agonists or antagonists of the present invention may be used to modulate hematopoietic activity (the formation of blood cells). For example, the polynucleotides, polypeptides, antibodies, and/or agonists or antagonists of the present invention may be used to increase the quantity of all or subsets of blood cells, such as, for example, erythrocytes, lymphocytes (B or T cells), myeloid cells (e.g., basophils, eosinophils, neutrophils, mast cells, macrophages) and platelets. The ability to decrease the quantity of blood cells or subsets of blood cells may be useful in the prevention, detection, diagnosis and/or treatment of anemias and leukopenias described below. Alternatively, the polynucleotides, polypeptides, antibodies, and/or agonists or antagonists of the present invention may be used to decrease the quantity of all or subsets of blood cells, such as, for example, erythrocytes, lymphocytes (B or T cells), myeloid cells (e.g., basophils, eosinophils, neutrophils, mast cells, macrophages) and platelets. The ability to decrease the quantity of blood cells or subsets of blood cells may be useful in the prevention, detection, diagnosis and/or treatment of leukocytoses, such as, for example eosinophilia.

[0564] The polynucleotides, polypeptides, antibodies, and/or agonists or antagonists of the present invention may be used to prevent, treat, or diagnose blood dyscrasia.

[0565] Anemias are conditions in which the number of red blood cells or amount of hemoglobin (the protein that carries oxygen) in them is below normal. Anemia may be caused by excessive bleeding, decreased red blood cell production, or increased red blood cell destruction (hemolysis). The polynucleotides, polypeptides, antibodies, and/or agonists or antagonists of the present invention may be useful in treating, preventing, and/or diagnosing anemias. Anemias that may be treated prevented or diagnosed by the polynucleotides, polypeptides, antibodies, and/or agonists or antagonists of the present invention include iron deficiency anemia, hypochromic anemia, microcytic anemia, chlorosis, hereditary sideroblastic anemia, idiopathic acquired sideroblastic anemia, red cell aplasia, megaloblastic anemia (e.g., pernicious anemia, (vitamin B12 deficiency) and folic acid deficiency anemia), aplastic anemia, hemolytic anemias (e.g., autoimmune helolytic anemia, microangiopathic hemolytic anemia, and paroxysmal nocturnal hemoglobinuria). The polynucleotides, polypeptides, antibodies, and/or agonists or antagonists of the present invention may be useful in treating, preventing, and/or diagnosing anemias associated with diseases including but not limited to, anemias associated with systemic lupus erythematosus, cancers, lymphomas, chronic renal disease, and enlarged spleens. The polynucleotides, polypeptides, antibodies, and/or agonists or antagonists of the present invention may be useful in treating, preventing, and/or diagnosing anemias arising from drug treatments such as anemias associated with methyldopa, dapsone, and/or sulfadrugs. Additionally, rhe polynucleotides, polypeptides, antibodies, and/or agonists or antagonists of the present invention may be useful in treating, preventing, and/or diagnosing anemias associated with abnormal red blood cell architecture including but not limited to, hereditary spherocytosis, hereditary elliptocytosis, glucose-6-phosphate dehydrogenase deficiency, and sickle cell anemia.

[0566] The polynucleotides, polypeptides, antibodies, and/or agonists or antagonists of the present invention may be useful in treating, preventing, and/or diagnosing hemoglobin abnormalities, (e.g., those associated with sickle cell anemia, hemoglobin C disease, hemoglobin S-C disease, and hemoglobin E disease). Additionally, the polynucleotides, polypeptides, antibodies, and/or agonists or antagonists of the present invention may be useful in diagnosing, prognosing, preventing, and/or treating thalassemias, including, but not limited to major and minor forms of alpha-thalassemia and beta-thalassemia.

[0567] In another embodiment, the polynucleotides, polypeptides, antibodies, and/or agonists or antagonists of the present invention may be useful in diagnosing, prognosing, preventing, and/or treating bleeding disorders including, but not limited to, thrombocytopenia (e.g., idiopathic thrombocytopenic purpura, and thrombotic thrombocytopenic purpura), Von Willebrand's disease, hereditary platelet disorders (e.g., storage pool disease such as Chediak-Higashi and Hermansky-Pudlak syndromes, thromboxane A2 dysfunction, thromboasthenia, and Bemard-Soulier syndrome), hemolytic-uremic syndrome, hemophelias such as hemophelia A or Factor VII deficiency and Christmas disease or Factor IX deficiency, Hereditary Hemorhhagic Telangiectsia, also known as Rendu-Osler-Weber syndrome, allergic purpura (Henoch Schonlein purpura) and disseminated intravascular coagulation.

[0568] The effect of the polynucleotides, polypeptides, antibodies, and/or agonists or antagonists of the present invention on the clotting time of blood may be monitored using any of the clotting tests known in the art including, but not limited to, whole blood partial thromboplastin time (PTT), the activated partial thromboplastin time (aPTT), the activated clotting time (ACT), the recalcified activated clotting time, or the Lee-White Clotting time.

[0569] Several diseases and a variety of drugs can cause platelet dysfunction. Thus, in a specific embodiment, the polynucleotides, polypeptides, antibodies, and/or agonists or antagonists of the present invention may be useful in diagnosing, prognosing, preventing, and/or treating acquired platelet dysfunction such as platelet dysfunction accompanying kidney failure, leukemia, multiple myeloma, cirrhosis of the liver, and systemic lupus erythematosus as well as platelet dysfunction associated with drug treatments, including treatment with aspirin, ticlopidine, nonsteroidal anti-inflammatory drugs (used for arthritis, pain, and sprains), and penicillin in high doses.

[0570] In another embodiment, the polynucleotides, polypeptides, antibodies, and/or agonists or antagonists of the present invention may be useful in diagnosing, prognosing, preventing, and/or treating diseases and disorders characterized by or associated with increased or decreased numbers of white blood cells. Leukopenia occurs when the number of white blood cells decreases below normal. Leukopenias include, but are not limited to, neutropenia and lymphocytopenia. An increase in the number of white blood cells compared to normal is known as leukocytosis. The body generates increased numbers of white blood cells during infection. Thus, leukocytosis may simply be a normal physiological parameter that reflects infection. Alternatively, leukocytosis may be an indicator of injury or other disease such as cancer. Leokocytoses, include but are not limited to, eosinophilia, and accumulations of macrophages. In specific embodiments, the polynucleotides, polypeptides, antibodies, and/or agonists or antagonists of the present invention may be useful in diagnosing, prognosing, preventing, and/or treating leukopenia. In other specific embodiments, the polynucleotides, polypeptides, antibodies, and/or agonists or antagonists of the present invention may be useful in diagnosing, prognosing, preventing, and/or treating leukocytosis.

[0571] Leukopenia may be a generalized decreased in all types of white blood cells, or may be a specific depletion of particular types of white blood cells. Thus, in specific embodiments, the polynucleotides, polypeptides, antibodies, and/or agonists or antagonists of the present invention may be useful in diagnosing, prognosing, preventing, and/or treating decreases in neutrophil numbers, known as neutropenia. Neutropenias that may be diagnosed, prognosed, prevented, and/or treated by the polynucleotides, polypeptides, antibodies, and/or agonists or antagonists of the present invention include, but are not limited to, infantile genetic agranulocytosis, familial neutropenia, cyclic neutropenia, neutropenias resulting from or associated with dietary deficiencies (e.g., vitamin B 12 deficiency or folic acid deficiency), neutropenias resulting from or associated with drug treatments (e.g., antibiotic regimens such as penicillin treatment, sulfonamide treatment, anticoagulant treatment, anticonvulsant drugs, anti-thyroid drugs, and cancer -chemotherapy), and neutropenias resulting from increased neutrophil destruction that may occur in association with some bacterial or viral infections, allergic disorders, autoimmune diseases, conditions in which an individual has an enlarged spleen (e.g., Felty syndrome, malaria and sarcoidosis), and some drug treatment regimens.

[0572] The polynucleotides, polypeptides, antibodies, and/or agonists or antagonists of the present invention may be useful in diagnosing, prognosing, preventing, and/or treating lymphocytopenias (decreased numbers of B and/or T lymphocytes), including, but not limited lymphocytopenias resulting from or associated with stress, drug treatments (e.g., drug treatment with corticosteroids, cancer chemotherapies, and/or radiation therapies), AIDS infection and/or other diseases such as, for example, cancer, rheumatoid arthritis, systemic lupus erythematosus, chronic infections, some viral infections and/or hereditary disorders (e.g., DiGeorge syndrome, Wiskott-Aldrich Syndome, severe combined immunodeficiency, ataxia telangiectsia).

[0573] The polynucleotides, polypeptides, antibodies, and/or agonists or antagonists of the present invention may be useful in diagnosing, prognosing, preventing, and/or treating diseases and disorders associated with macrophage numbers and/or macrophage function including, but not limited to, Gaucher's disease, Niemann-Pick disease, Letterer-Siwe disease and Hand-Schuller-Christian disease.

[0574] In another embodiment, the polynucleotides, polypeptides, antibodies, and/or agonists or antagonists of the present invention may be useful in diagnosing, prognosing, preventing, and/or treating diseases and disorders associated with eosinophil numbers and/or eosinophil function including, but not limited to, idiopathic hypereosinophilic syndrome, eosinophilia-myalgia syndrome, and Hand-Schuller-Christian disease.

[0575] In yet another embodiment, the polynucleotides, polypeptides, antibodies, and/or agonists or antagonists of the present invention may be useful in diagnosing, prognosing, preventing, and/or treating leukemias and lymphomas including, but not limited to, acute lymphocytic (lymphpblastic) leukemia (ALL), acute myeloid (myelocytic, myelogenous, myeloblastic, or myelomonocytic) leukemia, chronic lymphocytic leukemia (e.g., B cell leukemias, T cell leukemias, Sezary syndrome, and Hairy cell leukenia), chronic myelocytic (myeloid, myelogenous, or granulocytic) leukemia, Hodgkin's lymphoma, non-hodgkin's lymphoma, Burkitt's lymphoma, and mycosis fungoides.

[0576] In other embodiments, the polynucleotides, polypeptides, antibodies, and/or agonists or antagonists of the present invention may be useful in diagnosing, prognosing, preventing, and/or treating diseases and disorders of plasma cells including, but not limited to, plasma cell dyscrasias, monoclonal gammaopathies, monoclonal gammopathies of undetermined significance, multiple myeloma, macroglobulinemia, Waldenstrom's macroglobulinemia, cryoglobulinemia, and Raynaud's phenomenon.

[0577] In other embodiments, the polynucleotides, polypeptides, antibodies, and/or agonists or antagonists of the present invention may be useful in treating, preventing, and/or diagnosing myeloproliferative disorders, including but not limited to, polycythemia vera, relative polycythemia, secondary polycythemia, myelofibrosis, acute myelofibrosis, agnogenic myelod metaplasia, thrombocythemia, (including both primary and seconday thrombocythemia) and chronic myelocytic leukemia.

[0578] In other embodiments, the polynucleotides, polypeptides, antibodies, and/or agonists or antagonists of the present invention may be useful as a treatment prior to surgery, to increase blood cell production-.

[0579] In other embodiments, the polynucleotides, polypeptides, antibodies, and/or agonists or antagonists of the present invention may be useful as an agent to enhance the migration, phagocytosis, superoxide production, antibody dependent cellular cytotoxicity of neutrophils, eosionophils and macrophages.

[0580] In other embodiments, the polynucleotides, polypeptides, antibodies, and/or agonists or antagonists of the present invention may be useful as an agent to increase the number of stem cells in circulation prior to stem cells pheresis. In another specific embodiment, the polynucleotides, polypeptides, antibodies, and/or agonists or antagonists of the present invention may be useful as an agent to increase the number of stem cells in circulation prior to platelet pheresis.

[0581] In other embodiments, the polynucleotides, polypeptides, antibodies, and/or agonists or antagonists of the present invention may be useful as an agent to increase cytokine production.

[0582] In other embodiments, the polynucleotides, polypeptides, antibodies, and/or agonists or antagonists of the present invention may be useful in preventing, diagnosing, and/or treating primary hematopoietic disorders.

[0583] Hyperproliferative Disorders

[0584] In certain embodiments, polynucleotides or polypeptides, or agonists or antagonists of the present invention can be used to treat or detect hyperproliferative disorders, including neoplasms. Polynucleotides or polypeptides, or agonists or antagonists of the present invention may inhibit the proliferation of the disorder through direct or indirect interactions. Alternatively, Polynucleotides or polypeptides, or agonists or antagonists of the present invention may proliferate other cells which can inhibit the hyperproliferative disorder.

[0585] For example, by increasing an immune response, particularly increasing antigenic qualities of the hyperproliferative disorder or by proliferating, differentiating, or mobilizing T-cells, hyperproliferative disorders can be treated. This immune response may be increased by either enhancing an existing immune response, or by initiating a new immune response. Alternatively, decreasing an immune response may also be a method of treating hyperproliferative disorders, such as a chemotherapeutic agent.

[0586] Examples of hyperproliferative disorders that can be treated or detected by polynucleotides or polypeptides, or agonists or antagonists of the present invention include, but are not limited to neoplasms located in the: colon, abdomen, bone, breast, digestive system, liver, pancreas, peritoneum, endocrine glands (adrenal, parathyroid, pituitary, testicles, ovary, thymus, thyroid), eye, head and neck, nervous (central and peripheral), lymphatic system, pelvis, skin, soft tissue, spleen, thorax, and urogenital tract.

[0587] Similarly, other hyperproliferative disorders can also be treated or detected by polynucleotides or polypeptides, or agonists or antagonists of the present invention. Examples of such hyperproliferative disorders include, but are not limited to: Acute Childhood Lymphoblastic Leukemia, Acute Lymphoblastic Leukemia, Acute Lymphocytic Leukemia, Acute Myeloid Leukemia, Adrenocortical Carcinoma, Adult (Primary) Hepatocellular Cancer, Adult (Primary) Liver Cancer, Adult Acute Lymphocytic Leukemia, Adult Acute Myeloid Leukemia, Adult Hodgkin's Disease, Adult Hodgkin's Lymphoma, Adult Lymphocytic Leukemia, Adult Non-Hodgkin's Lymphoma, Adult Primary Liver Cancer, Adult Soft Tissue Sarcoma, AIDS-Related Lymphoma, AIDS-Related Malignancies, Anal Cancer, Astrocytoma, Bile Duct Cancer, Bladder Cancer, Bone Cancer, Brain Stem Glioma, Brain Tumors, Breast Cancer, Cancer of the Renal Pelvis and Ureter, Central Nervous System (Primary) Lymphoma, Central Nervous System Lymphoma, Cerebellar Astrocytoma, Cerebral Astrocytoma, Cervical Cancer, Childhood (Primary) Hepatocellular Cancer, Childhood (Primary) Liver Cancer, Childhood Acute Lymphoblastic Leukemia, Childhood Acute Myeloid Leukemia, Childhood Brain Stem Glioma, Childhood Cerebellar Astrocytoma, Childhood Cerebral Astrocytoma, Childhood Extracranial Germ Cell Tumors, Childhood Hodgkin's Disease, Childhood Hodgkin's Lymphoma, Childhood Hypothalamic and Visual Pathway Glioma, Childhood Lymphoblastic Leukemia, Childhood Medulloblastoma, Childhood Non-Hodgkin's Lymphoma, Childhood Pineal and Supratentorial Primitive Neuroectodermal Tumors, Childhood Primary Liver Cancer, Childhood Rhabdomyosarcoma, Childhood Soft Tissue Sarcoma, Childhood Visual Pathway and Hypothalamic Glioma, Chronic Lymphocytic Leukemia, Chronic Myelogenous Leukemia, Colon Cancer, Cutaneous T-Cell Lymphoma, Endocrine Pancreas Islet Cell Carcinoma, Endometrial Cancer, Ependymoma, Epithelial Cancer, Esophageal Cancer, Ewing's Sarcoma and Related Tumors, Exocrine Pancreatic Cancer, Extracranial Germ Cell Tumor, Extragonadal Germ Cell Tumor, Extrahepatic Bile Duct Cancer, Eye Cancer, Female Breast Cancer, Gaucher's Disease, Gallbladder Cancer, Gastric Cancer, Gastrointestinal Carcinoid Tumor, Gastrointestinal Tumors, Germ Cell Tumors, Gestational Trophoblastic Tumor, Hairy Cell Leukemia, Head and Neck Cancer, Hepatocellular Cancer, Hodgkin's Disease, Hodgkin's Lymphoma, Hypergammaglobulinemia, Hypopharyngeal Cancer, Intestinal Cancers, Intraocular Melanoma, Islet Cell Carcinoma, Islet Cell Pancreatic Cancer, Kaposi's Sarcoma, Kidney Cancer, Laryngeal Cancer, Lip and Oral Cavity Cancer, Liver Cancer, Lung Cancer, Lymphoproliferative Disorders, Macroglobulinemia, Male Breast Cancer, Malignant Mesothelioma, Malignant Thymoma, Medulloblastoma, Melanoma, Mesothelioma, Metastatic Occult Primary Squamous Neck Cancer, Metastatic Primary Squamous Neck Cancer, Metastatic Squamous Neck Cancer, Multiple Myeloma, Multiple Myeloma/Plasma Cell Neoplasm, Myelodysplastic Syndrome, Myelogenous Leukemia, Myeloid Leukemia, Myeloproliferative Disorders, Nasal Cavity and Paranasal Sinus Cancer, Nasopharyngeal Cancer, Neuroblastoma, Non-Hodgkin's Lymphoma During Pregnancy, Nonmelanoma Skin Cancer, Non-Small Cell Lung Cancer, Occult Primary Metastatic Squamous Neck Cancer, Oropharyngeal Cancer, Osteo/Malignant Fibrous Sarcoma, Osteosarcoma/Malignant Fibrous Histiocytoma, Osteosarcoma/Malignant Fibrous Histiocytoma of Bone, Ovarian Epithelial Cancer, Ovarian Germ Cell Tumor, Ovarian Low Malignant Potential Tumor, Pancreatic Cancer, Paraproteinemias, Purpura, Parathyroid Cancer, Penile Cancer, Pheochromocytoma, Pituitary Tumor, Plasma Cell Neoplasm/Multiple Myeloma, Primary Central Nervous System Lymphoma, Primary Liver Cancer, Prostate Cancer, Rectal Cancer, Renal Cell Cancer, Renal Pelvis and Ureter Cancer, Retinoblastoma, Rhabdomyosarcoma, Salivary Gland Cancer, Sarcoidosis Sarcomas, Sezary Syndrome, Skin Cancer, Small Cell Lung Cancer, Small Intestine Cancer, Soft Tissue Sarcoma, Squamous Neck Cancer, Stomach Cancer, Supratentorial Primitive Neuroectodermal and Pineal Tumors, T-Cell Lymphoma, Testicular Cancer, Thymoma, Thyroid Cancer, Transitional Cell Cancer of the Renal Pelvis and Ureter, Transitional Renal Pelvis and Ureter Cancer, Trophoblastic Tumors, Ureter and Renal Pelvis Cell Cancer, Urethral Cancer, Uterine Cancer, Uterine Sarcoma, Vaginal Cancer, Visual Pathway and Hypothalamic Glioma, Vulvar Cancer, Waldenstrom's Macroglobulinemia, Wilms' Tumor, and any other hyperproliferative disease, besides neoplasia, located in an organ system listed above.

[0588] In another preferred embodiment, polynucleotides or polypeptides, or agonists or antagonists of the present invention are used to diagnose, prognose, prevent, and/or treat premalignant conditions and to prevent progression to a neoplastic or malignant state, including but not limited to those disorders described above. Such uses are indicated in conditions known or suspected of preceding progression to neoplasia or cancer, in particular, where non-neoplastic cell growth consisting of hyperplasia, metaplasia, or most particularly, dysplasia has occurred (for review of such abnormal growth conditions, see Robbins and Angell, 1976, Basic Pathology, 2d Ed., W. B. Saunders Co., Philadelphia, pp. 68-79.)

[0589] Hyperplasia is a form of controlled cell proliferation, involving an increase in cell number in a tissue or organ, without significant alteration in structure or function. Hyperplastic disorders which can be diagnosed, prognosed, prevented, and/or treated with compositions of the invention (including polynucleotides, polypeptides, agonists or antagonists) include, but are not limited to, angiofollicular mediastinal lymph node hyperplasia, angiolymphoid hyperplasia with eosinophilia, atypical melanocytic hyperplasia, basal cell hyperplasia, benign giant lymph node hyperplasia, cementum hyperplasia, congenital adrenal hyperplasia, congenital sebaceous hyperplasia, cystic hyperplasia, cystic hyperplasia of the breast, denture hyperplasia, ductal hyperplasia, endometrial hyperplasia, fibromuscular hyperplasia, focal epithelial hyperplasia, gingival hyperplasia, inflammatory fibrous hyperplasia, inflammatory papillary hyperplasia, intravascular papillary endothelial hyperplasia, nodular hyperplasia of prostate, nodular regenerative hyperplasia, pseudoepitheliomatous hyperplasia, senile sebaceous hyperplasia, and verrucous hyperplasia.

[0590] Metaplasia is a form of controlled cell growth in which one type of adult or fully differentiated cell substitutes for another type of adult cell. Metaplastic disorders which can be diagnosed, prognosed, prevented, and/or treated with compositions of the invention (including polynucleotides, polypeptides, agonists or antagonists) include, but are not limited to, agnogenic myeloid metaplasia, apocrine metaplasia, atypical metaplasia, autoparenchymatous metaplasia, connective tissue metaplasia, epithelial metaplasia, intestinal metaplasia, metaplastic anemia, metaplastic ossification, metaplastic polyps, myeloid metaplasia, primary myeloid metaplasia, secondary myeloid metaplasia, squamous metaplasia, squamous metaplasia of amnion, and symptomatic myeloid metaplasia.

[0591] Dysplasia is frequently a forerunner of cancer, and is found mainly in the epithelia; it is the most disorderly form of non-neoplastic cell growth, involving a loss in individual cell uniformity and in the architectural orientation of cells. Dysplastic cells often have abnormally large, deeply stained nuclei, and exhibit pleomorphism. Dysplasia characteristically occurs where there exists chronic irritation or inflammation. Dysplastic disorders which can be diagnosed, prognosed, prevented, and/or treated with compositions of the invention (including polynucleotides, polypeptides, agonists or antagonists) include, but are not limited to, anhidrotic ectodermal dysplasia, anterofacial dysplasia, asphyxiating thoracic dysplasia, atriodigital dysplasia, bronchopulmonary dysplasia, cerebral dysplasia, cervical dysplasia, chondroectodermal dysplasia, cleidocranial dysplasia, congenital ectodermal dysplasia, craniodiaphysial dysplasia, craniocarpotarsal dysplasia, craniometaphysial dysplasia, dentin dysplasia, diaphysial dysplasia, ectodermal dysplasia, enamel dysplasia, encephalo-ophthalmic dysplasia, dysplasia epiphysialis hemimelia, dysplasia epiphysialis multiplex, dysplasia epiphysialis punctata, epithelial dysplasia, faciodigitogenital dysplasia, familial fibrous dysplasia of jaws, familial white folded dysplasia, fibromuscular dysplasia, fibrous dysplasia of bone, florid osseous dysplasia, hereditary renal-retinal dysplasia, hidrotic ectodermal dysplasia, hypohidrotic ectodermal dysplasia, lymphopenic thymic dysplasia, mammary dysplasia, mandibulofacial dysplasia, metaphysial dysplasia, Mondini dysplasia, monostotic fibrous dysplasia, mucoepithelial dysplasia, multiple epiphysial dysplasia, oculoauriculovertebral dysplasia, oculodentodigital dysplasia, oculovertebral dysplasia, odontogenic dysplasia, ophthalmomandibulomelic dysplasia, periapical cemental dysplasia, polyostotic fibrous dysplasia, pseudoachondroplastic spondyloepiphysial dysplasia, retinal dysplasia, septo-optic dysplasia, spondyloepiphysial dysplasia, and ventriculoradial dysplasia.

[0592] Additional pre-neoplastic disorders which can be diagnosed, prognosed, prevented, and/or treated with compositions of the invention (including polynucleotides, polypeptides, agonists or antagonists) include, but are not limited to, benign dysproliferative disorders (e.g., benign tumors, fibrocystic conditions, tissue hypertrophy, intestinal polyps, colon polyps, and esophageal dysplasia), leukoplakia, keratoses, Bowen's disease, Farner's Skin, solar cheilitis, and-solar keratosis.

[0593] In another embodiment, a polypeptide of the invention, or polynucleotides, antibodies, agonists, or antagonists corresponding to that polypeptide, may be used to diagnose and/or prognose disorders associated with the tissue(s) in which the polypeptide of the invention is expressed, including one, two, three, four, five, or more tissues disclosed in Table 1A, column 8 (Tissue Distribution Library Code).

[0594] In another embodiment, polynucleotides, polypeptides, antibodies, and/or agonists or antagonists of the present invention conjugated to a toxin or a radioactive isotope, as described herein, may be used to treat cancers and neoplasms, including, but not limited to those described herein. In a further preferred embodiment, polynucleotides, polypeptides, antibodies, and/or agonists or antagonists of the present invention conjugated to a toxin or a radioactive isotope, as described herein, may be used to treat acute myelogenous leukemia.

[0595] Additionally, polynucleotides, polypeptides, and/or agonists or antagonists of the invention may affect apoptosis, and therefore, would be useful in treating a number of diseases associated with increased cell survival or the inhibition of apoptosis. For example, diseases associated with increased cell survival or the inhibition of apoptosis that could be diagnosed, prognosed, prevented, and/or treated by polynucleotides, polypeptides, and/or agonists or antagonists of the invention, include cancers (such as follicular lymphomas, carcinomas with p53 mutations, and hormone-dependent tumors, including, but not limited to colon cancer, cardiac tumors, pancreatic cancer, melanoma, retinoblastoma, glioblastoma, lung cancer, intestinal cancer, testicular cancer, stomach cancer, neuroblastoma, myxoma, myoma, lymphoma, endothelioma, osteoblastoma, osteoclastoma, osteosarcoma, chondrosarcoma, adenoma, breast cancer, prostate cancer, Kaposi's sarcoma and ovarian cancer); autoimmune disorders such as, multiple sclerosis, Sjogren's syndrome, Hashimoto's thyroiditis, biliary cirrhosis, Behcet's disease, Crohn's disease, polymyositis, systemic lupus erythematosus and immune-related glomerulonephritis and rheumatoid arthritis) and viral infections (such as herpes viruses, pox viruses and adenoviruses), inflammation, graft v. host disease, acute graft rejection, and chronic graft rejection.

[0596] In preferred embodiments, polynucleotides, polypeptides, and/or agonists or antagonists of the invention are used to inhibit growth, progression, and/or metastasis of cancers, in particular those listed above.

[0597] Additional diseases or conditions associated with increased cell survival that could be diagnosed, prognosed, prevented, and/or treated by polynucleotides, polypeptides, and/or agonists or antagonists of the invention, include, but are not limited to, progression, and/or metastases of malignancies and related disorders such as leukemia (including acute leukemias (e.g., acute lymphocytic leukemia, acute myelocytic leukemia (including myeloblastic, promyelocytic, myelomonocytic, monocytic, and erythroleukemia)) and chronic leukemias (e.g., chronic myelocytic (granulocytic) leukemia and chronic lymphocytic leukemia)), polycythemia vera, lymphomas (e.g., Hodgkin's disease and non-Hodgkin's disease), multiple myeloma, Waldenstrom's macroglobulinemia, heavy chain disease, and solid tumors including, but not limited to, sarcomas and carcinomas such as fibrosarcoma, myxosarcoma, liposarcoma, chondrosarcoma, osteogenic sarcoma, chordoma, angiosarcoma, endotheliosarcoma, lymphangiosarcoma, lymphangioendotheliosarcoma, synovioma, mesothelioma, Ewing's tumor, leiomyosarcoma, rhabdomyosarcoma, colon carcinoma, pancreatic cancer, breast cancer, ovarian cancer, prostate cancer, squamous cell carcinoma, basal cell carcinoma, adenocarcinoma, sweat gland carcinoma, sebaceous gland carcinoma, papillary carcinoma, papillary adenocarcinomas, cystadenocarcinoma, medullary carcinoma, bronchogenic carcinoma, renal cell carcinoma, hepatoma, bile duct carcinoma, choriocarcinoma, seminoma, embryonal carcinoma, Wilm's tumor, cervical cancer, testicular tumor, lung carcinoma, small cell lung carcinoma, bladder carcinoma, epithelial carcinoma, glioma, astrocytoma, medulloblastoma, craniopharyngioma, ependymoma, pinealoma, emangioblastoma, acoustic neuroma, oligodendroglioma, menangioma, melanoma, neuroblastoma, and retinoblastoma.

[0598] Diseases associated with increased apoptosis that could be diagnosed, prognosed, prevented, and/or treated by polynucleotides, polypeptides, and/or agonists or antagonists of the invention, include AIDS; neurodegenerative disorders (such as Alzheimer's disease, Parkinson's disease, amyotrophic lateral sclerosis, retinitis pigmentosa, cerebellar degeneration and brain tumor or prior associated disease); autoimmune disorders (such as, multiple sclerosis, Sjogren's syndrome, Hashimoto's thyroiditis, biliary cirrhosis, Behcet's disease, Crohn's disease, polymyositis, systemic lupus erythematosus and immune-related glomerulonephritis and rheumatoid arthritis) myelodysplastic syndromes (such as aplastic anemia), graft v. host disease, ischemic injury (such as that caused by myocardial infarction, stroke and reperfusion injury), liver injury (e.g., hepatitis related liver injury, ischemia/reperfusion injury, cholestosis (bile duct injury) and liver cancer); toxin-induced liver disease (such as that caused by alcohol), septic shock, cachexia and anorexia.

[0599] Hyperproliferative diseases and/or disorders that could be diagnosed, prognosed, prevented, and/or treated by polynucleotides, polypeptides, and/or agonists or antagonists of the invention, include, but are not limited to, neoplasms located in the liver, abdomen, bone, breast, digestive system, pancreas, peritoneum, endocrine glands (adrenal, parathyroid, pituitary, testicles, ovary, thymus, thyroid), eye, head and neck, nervous system (central and peripheral), lymphatic system, pelvis, skin, soft tissue, spleen, thorax, and urogenital tract.

[0600] Similarly, other hyperproliferative disorders can also be diagnosed, prognosed, prevented, and/or treated by polynucleotides, polypeptides, and/or agonists or antagonists of the invention. Examples of such hyperproliferative disorders include, but are not limited to: hypergammaglobulinemia, lymphoproliferative disorders, paraproteinemias, purpura, sarcoidosis, Sezary Syndrome, Waldenstron's macroglobulinemia, Gaucher's Disease, histiocytosis, and any other hyperproliferative disease, besides neoplasia, located in an organ system listed above.

[0601] Another preferred embodiment utilizes polynucleotides of the present invention to inhibit aberrant cellular division, by gene therapy using the present invention, and/or protein fusions or fragments thereof.

[0602] Thus, the present invention provides a method for treating cell proliferative disorders by inserting into an abnormally proliferating cell a polynucleotide of the present invention, wherein said polynucleotide represses said expression.

[0603] Another embodiment of the present invention provides a method of treating cell-proliferative disorders in individuals comprising administration of one or more active gene copies of the present invention to an abnormally proliferating cell or cells. In a preferred embodiment, polynucleotides of the present invention is a DNA construct comprising a recombinant expression vector effective in expressing a DNA sequence encoding said polynucleotides. In another preferred embodiment of the present invention, the DNA construct encoding the poynucleotides of the present invention is inserted into cells to be treated utilizing a retrovirus, or more preferably an adenoviral vector (See G J. Nabel, et. al., PNAS 1999 96: 324-326, which is hereby incorporated by reference). In a most preferred embodiment, the viral vector is defective and will not transform non-proliferating cells, only proliferating cells. Moreover, in a preferred embodiment, the polynucleotides of the present invention inserted into proliferating cells either alone, or in combination with or fused to other polynucleotides, can then be modulated via an external stimulus (i.e. magnetic, specific small molecule, chemical, or drug administration, etc.), which acts upon the promoter upstream of said polynucleotides to induce expression of the encoded protein product. As such the beneficial therapeutic affect of the present invention may be expressly modulated (i.e. to increase, decrease, or inhibit expression of the present invention) based upon said external stimulus.

[0604] Polynucleotides of the present invention may be useful in repressing expression of oncogenic genes or antigens. By “repressing expression of the oncogenic genes” is intended the suppression of the transcription of the gene, the degradation of the gene transcript (pre-message RNA), the inhibition of splicing, the destruction of the messenger RNA, the prevention of the post-translational modifications of the protein, the destruction of the protein, or the inhibition of the normal function of the protein.

[0605] For local administration to abnormally proliferating cells, polynucleotides of the present invention may be administered by any method known to those of skill in the art including, but not limited to transfection, electroporation, microinjection of cells, or in vehicles such as liposomes, lipofectin, or as naked polynucleotides, or any other method described throughout the specification. The polynucleotide of the present invention may be delivered by known gene delivery systems such as, but not limited to, retroviral vectors (Gilboa, J. Virology 44:845 (1982); Hocke, Nature 320:275 (1986); Wilson, et al., Proc. Natl. Acad. Sci. U.S.A. 85:3014), vaccinia virus system (Chakrabarty et al., Mol. Cell Biol. 5:3403 (1985) or other efficient DNA delivery systems (Yates et al., Nature 313:812 (1985)) known to those skilled in the art. These references are exemplary only and are hereby incorporated by reference. In order to specifically deliver or transfect cells which are abnormally proliferating and spare non-dividing cells, it is preferable to utilize a retrovirus, or adenoviral (as described in the art and elsewhere herein) delivery system known to those of skill in the art. Since host DNA replication is required for retroviral DNA to integrate and the retrovirus will be unable to self replicate due to the lack of the retrovirus genes needed for its life cycle. Utilizing such a retroviral delivery system for polynucleotides of the present invention will target said gene and constructs to abnormally proliferating cells and will spare the non-dividing normal cells.

[0606] The polynucleotides of the present invention may be delivered directly to cell proliferative disorder/disease sites in internal organs, body cavities and the like by use of imaging devices used to guide an injecting-needle directly to the disease site. The polynucleotides of the present invention may also be administered to disease sites at the time of surgical intervention.

[0607] By “cell proliferative disease” is meant any human or animal disease or disorder, affecting any one or any combination of organs, cavities, or body parts, which is characterized by single or multiple local abnormal proliferations of cells, groups of cells, or tissues, whether benign or malignant.

[0608] Any amount of the polynucleotides of the present invention may be administered as long as it has a biologically inhibiting effect on the proliferation of the treated cells. Moreover, it is possible to administer more than one of the polynucleotide of the present invention simultaneously to the same site. By “biologically inhibiting” is meant partial or total growth inhibition as well as decreases in the rate of proliferation or growth of the cells. The biologically inhibitory dose may be determined by assessing the effects of the polynucleotides of the present invention on target malignant or abnormally proliferating cell growth in tissue culture, tumor growth in animals and cell cultures, or any other method known to one of ordinary skill in the art.

[0609] The present invention is further directed to antibody-based therapies which involve administering of anti-polypeptides and anti-polynucleotide antibodies to a mammalian, preferably human, patient for treating one or more of the described disorders. Methods for producing anti-polypeptides and anti-polynucleotide antibodies polyclonal and monoclonal antibodies are described in detail elsewhere herein. Such antibodies may be provided in pharmaceutically acceptable compositions as known in the art or as described herein.

[0610] A summary of the ways in which the antibodies of the present invention may be used therapeutically includes binding polynucleotides or polypeptides of the present invention locally or systemically in the body or by direct cytotoxicity of the antibody, e.g. as mediated by complement (CDC) or by effector cells (ADCC). Some of these approaches are described in more detail below. Armed with the teachings provided herein, one of ordinary skill in the art will know how to use the antibodies of the present invention for diagnostic, monitoring or therapeutic purposes without undue experimentation.

[0611] In particular, the antibodies, fragments and derivatives of the present invention are useful for treating a subject having or developing cell proliferative and/or differentiation disorders as described herein. Such treatment comprises administering a single or multiple doses of the antibody, or a fragment, derivative, or a conjugate thereof.

[0612] The antibodies of this invention may be advantageously utilized in combination with other monoclonal or chimeric antibodies, or with lymphokines or hematopoietic growth factors, for example., which serve to increase the number or activity of effector cells which interact with the antibodies.

[0613] It is preferred to use high affinity and/or potent in vivo inhibiting and/or neutralizing antibodies against polypeptides or polynucleotides of the present invention, fragments or regions thereof, for both immunoassays directed to and therapy of disorders related to polynucleotides or polypeptides, including fragements thereof, of the present invention. Such antibodies, fragments, or regions, will preferably have an affinity for polynucleotides or polypeptides, including fragements thereof. Preferred binding affinities include those with a dissociation constant or Kd less than 5×10⁻⁶M, 10⁻⁶M, 5×10⁻⁷M, 10⁻⁷M, 5×10⁻⁸M, 10⁻⁸M, 5×10⁻⁹M, 10⁻⁹M, 5×10⁻¹⁰M, 10⁻¹⁰M, 5×10⁻¹¹M, 10⁻¹¹M, 5×10¹²M, 10⁻¹²M, 5×10⁻¹³M, 10⁻¹³M, 5×10⁻¹⁴M, 10⁻¹⁴M, 5×10⁻¹⁵M, and 10⁻¹⁵M.

[0614] Moreover, polypeptides of the present invention are useful in inhibiting the angiogenesis of proliferative cells or tissues, either alone, as a protein fusion, or in combination with other polypeptides directly or indirectly, as described elsewhere herein. In a most preferred embodiment, said anti-angiogenesis effect may be achieved indirectly, for example, through the inhibition of hematopoietic, tumor-specific cells, such as tumor-associated macrophages (See Joseph I B, et al. J Natl Cancer Inst, 90(21): 1648-53 (1998), which is hereby incorporated by reference). Antibodies directed to polypeptides or polynucleotides of the present invention may also result in inhibition of angiogenesis directly, or indirectly (See Witte L, et al., Cancer Metastasis Rev. 17(2): 155-61 (1998), which is hereby incorporated by reference)).

[0615] Polypeptides, including protein fusions, of the present invention, or fragments thereof may be useful in inhibiting proliferative cells or tissues through the induction of apoptosis. Said polypeptides may act either directly, or indirectly to induce apoptosis of proliferative cells and tissues, for example in the activation of a death-domain receptor, such as tumor necrosis factor (TNF) receptor-1, CD95 (Fas/APO-1), TNF-receptor-related apoptosis-mediated protein (TRAMP) and TNF-related apoptosis-inducing ligand (TRAIL) receptor-1 and -2 (See Schulze-Osthoff K, et. al., Eur J Biochem 254(3): 439-59 (1998), which is hereby incorporated by reference). Moreover, in another preferred embodiment of the present invention, said polypeptides may induce apoptosis through other mechanisms, such as in the activation of other proteins which will activate apoptosis, or through stimulating the expression of said proteins, either alone or in combination with small molecule drugs or adjuviants, such as apoptonin, galectins, thioredoxins, anti-inflammatory proteins (See for example, Mutat Res 400(1-2): 447-55 (1998), Med Hypotheses.50(5): 423-33 (1998), Chem Biol Interact. Apr 24;111-112:23-34 (1998), J Mol Med.76(6): 402-12 (1998), Int J Tissue React;20(1): 3-15 (1998), which are all hereby incorporated by reference).

[0616] Polypeptides, including protein fusions to, or fragments thereof, of the present invention are useful in inhibiting the metastasis of proliferative cells or tissues. Inhibition may occur as a direct result of administering polypeptides, or antibodies directed to said polypeptides as described elsewere herein, or indirectly, such as activating the expression of proteins known to inhibit metastasis, for example alpha 4 integrins, (See, e.g., Curr Top Microbiol Immunol 1998;231:125-41, which is hereby incorporated by reference). Such thereapeutic affects of the present invention may be achieved either alone, or in combination with small molecule drugs or adjuvants.

[0617] In another embodiment, the invention provides a method of delivering compositions containing the polypeptides of the invention (e.g., compositions containing polypeptides or polypeptide antibodes associated with heterologous polypeptides, heterologous nucleic acids, toxins, or prodrugs) to targeted cells expressing the polypeptide of the present invention. Polypeptides or polypeptide antibodes of the invention may be associated with with heterologous polypeptides, heterologous nucleic acids, toxins, or prodrugs via hydrophobic, hydrophilic, ionic and/or covalent interactions.

[0618] Polypeptides, protein fusions to, or fragments thereof, of the present invention are useful in enhancing the immunogenicity and/or antigenicity of proliferating cells or tissues, either directly, such as would occur if the polypeptides of the present invention ‘vaccinated’ the immune response to respond to proliferative antigens and immunogens, or indirectly, such as in activating the expression of proteins known to enhance the immune response (e.g. chemokines), to said antigens and immunogens.

[0619] Renal Disorders

[0620] Polynucleotides, polypeptides, antibodies, and/or agonists or antagonists of the present invention, may be used to treat, prevent, diagnose, and/or prognose disorders of the renal system. Renal disorders which can be diagnosed, prognosed, prevented, and/or treated with compositions of the invention include, but are not limited to, kidney failure, nephritis, blood vessel disorders of kidney, metabolic and congenital kidney disorders, urinary disorders of the kidney, autoimmune disorders, sclerosis and necrosis, electrolyte imbalance, and kidney cancers.

[0621] Kidney diseases which can be diagnosed, prognosed, prevented, and/or treated with compositions of the invention include, but are not limited to, acute kidney failure, chronic kidney failure, atheroembolic renal failure, end-stage renal disease, inflammatory diseases of the kidney (e.g., acute glomerulonephritis, postinfectious glomerulonephritis, rapidly progressive glomerulonephritis, nephrotic syndrome, membranous glomerulonephritis, familial nephrotic syndrome, membranoproliferative glomerulonephritis I and II, mesangial proliferative glomerulonephritis, chronic glomerulonephritis, acute tubulointerstitial nephritis, chronic tubulointerstitial nephritis, acute post-streptococcal glomerulonephritis (PSGN), pyelonephritis, lupus nephritis, chronic nephritis, interstitial nephritis, and post-streptococcal glomerulonephritis), blood vessel disorders of the kidneys (e.g., kidney infarction, atheroembolic kidney disease, cortical necrosis, malignant nephrosclerosis, renal vein thrombosis, renal underperfusion, renal retinopathy, renal ischemia-reperfusion, renal artery embolism, and renal artery stenosis), and kidney disorders resulting form urinary tract disease (e.g., pyelonephritis, hydronephrosis, urolithiasis (renal lithiasis, nephrolithiasis), reflux nephropathy, urinary tract infections, urinary retention, and acute or chronic unilateral obstructive uropathy.)

[0622] In addition, compositions of the invention can be used to diagnose, prognose, prevent, and/or treat metabolic and congenital disorders of the kidney (e.g., uremia, renal amyloidosis, renal osteodystrophy, renal tubular acidosis, renal glycosuria, nephrogenic diabetes insipidus, cystinuria, Fanconi's syndrome, renal fibrocystic osteosis (renal rickets), Hartnup disease, Bartter's syndrome, Liddle's syndrome, polycystic kidney disease, medullary cystic disease, medullary sponge kidney, Alport's syndrome, nail-patella syndrome, congenital nephrotic syndrome, CRUSH syndrome, horseshoe kidney, diabetic nephropathy, nephrogenic diabetes insipidus, analgesic nephropathy, kidney stones, and membranous nephropathy), and autoimmune disorders of the kidney (e.g., systemic lupus erythematosus (SLE), Goodpasture syndrome, IgA nephropathy, and IgM mesangial proliferative glomerulonephritis).

[0623] Compositions of the invention can also be used to diagnose, prognose, prevent, and/or treat sclerotic or necrotic disorders of the kidney (e.g., glomerulosclerosis, diabetic nephropathy, focal segmental glomerulosclerosis (FSGS), necrotizing glomerulonephritis, and renal papillary necrosis), cancers of the kidney (e.g., nephroma, hypemephroma, nephroblastoma, renal cell cancer, transitional cell cancer, renal adenocarcinoma, squamous cell cancer, and Wilm's tumor), and electrolyte imbalances (e.g., nephrocalcinosis, pyuria, edema, hydronephritis, proteinuria, hyponatremia, hypernatremia, hypokalemia, hyperkalemia, hypocalcemia, hypercalcemia, hypophosphatemia, and hyperphosphatemia).

[0624] Polypeptides may be administered using any method known in the art, including, but not limited to, direct needle injection at the delivery site, intravenous injection, topical administration, catheter infusion, biolistic injectors, particle accelerators, gelfoam sponge depots, other commercially available depot materials, osmotic pumps, oral or suppositorial solid pharmaceutical formulations, decanting or topical applications during surgery, aerosol delivery. Such methods are known in the art. Polypeptides may be administered as part of a Therapeutic, described in more detail below. Methods of delivering polynucleotides are described in more detail herein.

[0625] Cardiovascular Disorders

[0626] Polynucleotides or polypeptides, or agonists or antagonists of the present invention, may be used to treat, prevent, diagnose, and/or prognose cardiovascular disorders, including, but not limited to, peripheral artery disease, such as limb ischemia.

[0627] Cardiovascular disorders include, but are not limited to, cardiovascular abnormalities, such as arterio-arterial fistula, arteriovenous fistula, cerebral arteriovenous malformations, congenital heart defects, pulmonary atresia, and Scimitar Syndrome. ° C.ongenital heart defects include, but are not limited to, aortic coarctation, cor triatriatum, coronary vessel anomalies, crisscross heart, dextrocardia, patent ductus arteriosus, Ebstein's anomaly, Eisenmenger complex, hypoplastic left heart syndrome, levocardia, tetralogy of fallot, transposition of great vessels, double outlet right ventricle, tricuspid atresia, persistent truncus arteriosus, and heart septal defects, such as aortopulmonary septal defect, endocardial cushion defects, Lutembacher's Syndrome, trilogy of Fallot, ventricular heart septal defects.

[0628] Cardiovascular disorders also include, but are not limited to, heart disease, such as arrhythmias, carcinoid heart disease, high cardiac output, low cardiac output, cardiac tamponade, endocarditis (including bacterial), heart aneurysm, cardiac arrest, congestive heart failure, congestive cardiomyopathy, paroxysmal dyspnea, cardiac edema, heart hypertrophy, congestive cardiomyopathy, left ventricular hypertrophy, right ventricular hypertrophy, post-infarction heart rupture, ventricular septal rupture, heart valve diseases, myocardial diseases, myocardial ischemia, pericardial effusion, pericarditis (including constrictive and tuberculous), pneumopericardium, postpericardiotomy syndrome, pulmonary heart disease, rheumatic heart disease, ventricular dysfunction, hyperemia, cardiovascular pregnancy complications, Scimitar Syndrome, cardiovascular syphilis, and cardiovascular tuberculosis.

[0629] Arrhythmias include, but are not limited to, sinus arrhythmia, atrial fibrillation, atrial flutter, bradycardia, extrasystole, Adams-Stokes Syndrome, bundle-branch block, sinoatrial block, long QT syndrome, parasystole, Lown-Ganong-Levine Syndrome, Mahaim-type pre-excitation syndrome, Wolff-Parkinson-White syndrome, sick sinus syndrome, tachycardias, and ventricular fibrillation. Tachycardias include paroxysmal tachycardia, supraventricular tachycardia, accelerated idioventricular rhythm, atrioventricular nodal reentry tachycardia, ectopic atrial tachycardia, ectopic junctional tachycardia, sinoatrial nodal reentry tachycardia, sinus tachycardia, Torsades de Pointes, and ventricular tachycardia.

[0630] Heart valve diseases include, but are not limited to, aortic valve insufficiency, aortic valve stenosis, hear murmurs, aortic valve prolapse, mitral valve prolapse, tricuspid valve prolapse, mitral valve insufficiency, mitral valve stenosis, pulmonary atresia, pulmonary valve insufficiency, pulmonary valve stenosis, tricuspid atresia, tricuspid valve insufficiency, and tricuspid valve stenosis.

[0631] Myocardial diseases include, but are not limited to, alcoholic cardiomyopathy, congestive cardiomyopathy, hypertrophic cardiomyopathy, aortic subvalvular stenosis, pulmonary subvalvular stenosis, restrictive cardiomyopathy, Chagas cardiomyopathy, endocardial fibroelastosis, endomyocardial fibrosis, Kearns Syndrome, myocardial reperfusion injury, and myocarditis.

[0632] Myocardial ischemias include, but are not limited to, coronary disease, such as angina pectoris, coronary aneurysm, coronary arteriosclerosis, coronary thrombosis, coronary vasospasm, myocardial infarction and myocardial stunning.

[0633] Cardiovascular diseases also include vascular diseases such as aneurysms, angiodysplasia, angiomatosis, bacillary angiomatosis, Hippel-Lindau Disease, Klippel-Trenaunay-Weber Syndrome, Sturge-Weber Syndrome, angioneurotic edema, aortic diseases, Takayasu's Arteritis, aortitis, Leriche's Syndrome, arterial occlusive diseases, arteritis, enarteritis, polyarteritis nodosa, cerebrovascular disorders, diabetic angiopathies, diabetic retinopathy, embolisms, thrombosis, erythromelalgia, hemorrhoids, hepatic veno-occlusive disease, hypertension, hypotension, ischemia, peripheral vascular 'diseases, phlebitis, pulmonary veno-occlusive disease, Raynaud's disease, CREST syndrome, retinal vein occlusion, Scimitar syndrome, superior vena cava syndrome, telangiectasia, atacia telangiectasia, hereditary hemorrhagic telangiectasia, varicocele, varicose veins, varicose ulcer, vasculitis, and venous insufficiency.

[0634] Aneurysms include, but are not limited to, dissecting aneurysms, false aneurysms, infected aneurysms, ruptured aneurysms, aortic aneurysms, cerebral aneurysms, coronary aneurysms, heart aneurysms, and iliac aneurysms.

[0635] Arterial occlusive diseases include, but are not limited to, arteriosclerosis, intermittent claudication, carotid stenosis, fibromuscular dysplasias, mesenteric vascular occlusion, Moyamoya disease, renal artery obstruction, retinal artery occlusion, and thromboangiitis obliterans.

[0636] Cerebrovascular disorders include, but are not limited to, carotid artery diseases, cerebral amyloid angiopathy, cerebral aneurysm, cerebral anoxia, cerebral arteriosclerosis, cerebral arteriovenous malformation, cerebral artery diseases, cerebral embolism and thrombosis, carotid artery thrombosis, sinus thrombosis, Wallenberg's syndrome, cerebral hemorrhage, epidural hematoma, subdural hematoma, subaraxhnoid hemorrhage, cerebral infarction, cerebral ischemia (including transient), subclavian steal syndrome, periventricular leukomalacia, vascular headache, cluster headache, migraine, and vertebrobasilar insufficiency.

[0637] Embolisms include, but are not limited to, air embolisms, amniotic fluid embolisms, cholesterol embolisms, blue toe syndrome, fat embolisms, pulmonary embolisms, and thromoboembolisms. Thrombosis include, but are not limited to, coronary thrombosis, hepatic vein thrombosis, retinal vein occlusion, carotid artery thrombosis, sinus thrombosis, Wallenberg's syndrome, and thrombophlebitis.

[0638] Ischemic disorders include, but are not limited to, cerebral ischemia, ischemic colitis, compartment syndromes, anterior compartment syndrome, myocardial ischemia, reperfusion injuries, and peripheral limb ischemia. Vasculitis includes, but is not limited to, aortitis, arteritis, Behcet's Syndrome, Churg-Strauss Syndrome, mucocutaneous lymph node syndrome, thromboangiitis obliterans, hypersensitivity vasculitis, Schoenlein-Henoch purpura, allergic cutaneous vasculitis, and Wegener's granulomatosis.

[0639] Polypeptides may be administered using any method known in the art, including, but not limited to, direct needle injection at the delivery site, intravenous injection, topical administration, catheter infusion, biolistic injectors, particle accelerators, gelfoam sponge depots, other commercially available depot materials, osmotic pumps, oral or suppositorial solid pharmaceutical formulations, decanting or topical applications during surgery, aerosol delivery. Such methods are known in the art. Polypeptides may be administered as part of a Therapeutic, described in more detail below. Methods of delivering polynucleotides are described in more detail herein.

[0640] Respiratory Disorders

[0641] Polynucleotides or polypeptides, or agonists or antagonists of the present invention may be used to treat, prevent, diagnose, and/or prognose diseases and/or disorders of the respiratory system.

[0642] Diseases and disorders of the respiratory system include, but are not limited to, nasal vestibulitis, nonallergic rhinitis (e.g., acute rhinitis, chronic rhinitis, atrophic rhinitis, vasomotor rhinitis), nasal polyps, and sinusitis, juvenile angiofibromas, cancer of the nose and juvenile papillomas, vocal cord polyps, nodules (singer's nodules), contact ulcers, vocal cord paralysis, laryngoceles, pharyngitis (e.g., viral and bacterial), tonsillitis, tonsillar cellulitis, parapharyngeal abscess, laryngitis, laryngoceles, and throat cancers (e.g., cancer of the nasopharynx, tonsil cancer, larynx cancer), lung cancer (e.g., squamous cell carcinoma, small cell (oat cell) carcinoma, large cell carcinoma, and adenocarcinoma), allergic disorders (eosinophilic pneumonia, hypersensitivity pneumonitis (e.g., extrinsic allergic alveolitis, allergic interstitial pneumonitis, organic dust pneumoconiosis, allergic bronchopulmonary aspergillosis, asthma, Wegener's granulomatosis (granulomatous vasculitis), Goodpasture's syndrome)), pneumonia (e.g., bacterial pneumonia (e.g., Streptococcus pneumoniae (pneumoncoccal pneumonia), Staphylococcus aureus (staphylococcal pneumonia), Gram-negative bacterial pneumonia (caused by, e.g., Klebsiella and Pseudomas spp.), Mycoplasma pneumoniae pneumonia, Hemophilus influenzae pneumonia, Legionella pneumophila (Legionnaires' disease), and Chlamydia psittaci (Psittacosis)), and viral pneumonia (e.g., influenza, chickenpox (varicella).

[0643] Additional diseases and disorders of the respiratory system include, but are not limited to bronchiolitis, polio (poliomyelitis), croup, respiratory syncytial viral infection, mumps, erythema infectiosum (fifth disease), roseola infantum, progressive rubella panencephalitis, german measles, and subacute sclerosing panencephalitis), fungal pneumonia (e.g., Histoplasmosis, Coccidioidomycosis, Blastomycosis, fungal infections in people with severely suppressed immune systems (e.g., cryptococcosis, caused by Cryptococcus neoformans; aspergillosis, caused by Aspergillus spp.; candidiasis, caused by Candida; and mucormycosis)), Pneumocystis carinii (pneumocystis pneumonia), atypical pneumonias (e.g., Mycoplasma and Chlamydia spp.), opportunistic infection pneumonia, nosocomial pneumonia, chemical pneumonitis, and aspiration pneumonia, pleural disorders (e.g., pleurisy, pleural effusion, and pneumothorax (e.g., simple spontaneous pneumothorax, complicated spontaneous pneumothorax, tension pneumothorax)), obstructive airway diseases (e.g., asthma, chronic obstructive pulmonary disease (COPD), emphysema, chronic or acute bronchitis), occupational lung diseases (e.g., silicosis, black lung (coal workers' pneumoconiosis), asbestosis, berylliosis, occupational asthsma, byssinosis, and benign pneumoconioses), Infiltrative Lung Disease (e.g., pulmonary fibrosis (e.g., fibrosing alveolitis, usual interstitial pneumonia), idiopathic pulmonary fibrosis, desquamative interstitial pneumonia, lymphoid interstitial pneumonia, histiocytosis X (e.g., Letterer-Siwe disease, Hand-Schüller-Christian disease, eosinophilic granuloma), idiopathic pulmonary hemosiderosis, sarcoidosis and pulmonary alveolar proteinosis), Acute respiratory distress syndrome (also called, e.g., adult respiratory distress syndrome), edema, pulmonary embolism, bronchitis (e.g., viral, bacterial), bronchiectasis, atelectasis, lung abscess (caused by, e.g., Staphylococcus aureus or Legionella pneumophila), and cystic fibrosis.

[0644] Anti-angiogenesis Activity

[0645] The naturally occurring balance between endogenous stimulators and inhibitors of angiogenesis is one in which inhibitory influences predominate. Rastinejad et al., Cell 56:345-355 (1989). In those rare instances in which neovascularization occurs under normal physiological conditions, such as wound healing, organ regeneration, embryonic development, and female reproductive processes, angiogenesis is stringently regulated and spatially and temporally delimited. Under conditions of pathological angiogenesis such as that characterizing solid tumor growth, these regulatory controls fail. Unregulated angiogenesis becomes pathologic and sustains progression of many neoplastic and non-neoplastic diseases. A number of serious diseases are dominated by abnormal neovascularization including solid tumor growth and metastases, arthritis, some types of eye disorders, and psoriasis. See, e.g., reviews by Moses et al., Biotech. 9:630-634 (1991); Folkman et al., N. Engl. J. Med., 333:1757-1763 (1995); Auerbach et al., J. Microvasc. Res. 29:401-411 (1985); Folkman, Advances in Cancer Research, eds. Klein and Weinhouse, Academic Press, New York, pp. 175-203 (1985); Patz, Am. J. OpthalmoL 94:715-743 (1982); and Folkman et al., Science 221:719-725 (1983). In a number of pathological conditions, the process of angiogenesis contributes to the disease state. For example, significant data have accumulated which suggest that the growth of solid tumors is dependent on angiogenesis. Folkman and Klagsbrun, Science 235:442-447 (1987).

[0646] The present invention provides for treatment of diseases or disorders associated with neovascularization by administration of the polynucleotides and/or polypeptides of the invention, as well as agonists or antagonists of the present invention. Malignant and metastatic conditions which can be treated with the polynucleotides and polypeptides, or agonists or antagonists of the invention include, but are not limited to, malignancies, solid tumuors, and cancers described herein and otherwise known in the art (for a review of such disorders, see Fishman et al., Medicine, 2d Ed., J. B. Lippincott Co., Philadelphia (1985)). Thus, the present invention provides a method of treating an angiogenesis-related disease and/or disorder, comprising administering to an individual in need thereof a therapeutically effective amount of a polynucleotide, polyp eptide, antagonist and/or agonist of the invention. For example, polynucleotides, polypeptides, antagonists and/or agonists may be utilized in a variety of additional methods in order to therapeutically treat a cancer or tumor. Cancers which may be treated with polynucleotides, polypeptides, antagonists and/or agonists include, but are not limited to solid tumors, including prostate, lung, breast, ovarian, stomach, pancreas, larynx, esophagus, testes, liver, parotid, biliary tract, colon, rectum, cervix, uterus, endometrium, kidney, bladder, thyroid cancer; primary tumors and metastases; melanomas; glioblastoma; Kaposi's sarcoma; leiomyosarcoma; non-small cell lung cancer; colorectal cancer; advanced malignancies; and blood born tumors such as leukemias. For example, polynucleotides, polypeptides, antagonists and/or agonists may be delivered topically, in order to treat cancers such as skin cancer, head and neck tumors, breast tumors, and Kaposi's sarcoma.

[0647] Within yet other aspects, polynucleotides, polypeptides, antagonists and/or agonists may be utilized to treat superficial forms of bladder cancer by, for example, intravesical administration. Polynucleotides, polypeptides, antagonists and/or agonists may be delivered directly into the tumor, or near the tumor site, via injection or a catheter. Of course, as the artisan of ordinary skill will appreciate, the appropriate mode of administration will vary according to the cancer to be treated. Other modes of delivery are discussed herein.

[0648] Polynucleotides, polypeptides, antagonists and/or agonists may be useful in treating other disorders, besides cancers, which involve angiogenesis. These disorders include, but are not limited to: benign tumors, for example hemangiomas, acoustic neuromas, neurofibromas, trachomas, and pyogenic granulomas; artheroscleric plaques; ocular angiogenic diseases, for example, diabetic retinopathy, retinopathy of prematurity, macular degeneration, corneal graft rejection, neovascular glaucoma, retrolental fibroplasia, rubeosis, retinoblastoma, uvietis and Pterygia (abnormal blood vessel growth) of the eye; rheumatoid arthritis; psoriasis; delayed wound healing; endometriosis; vasculogenesis; granulations; hypertrophic scars (keloids); nonunion fractures; scleroderma; trachoma; vascular adhesions; myocardial angiogenesis; coronary collaterals; cerebral collaterals; arteriovenous malformations; ischemic limb angiogenesis; Osler-Webber Syndrome; plaque neovascularization; telangiectasia; hemophiliac joints; angiofibroma; fibromuscular dysplasia; wound granulation; Crohn's disease; and atherosclerosis.

[0649] For example, within one aspect of the present invention methods are provided for treating hypertrophic scars and keloids, comprising the step of administering a polynucleotide, polypeptide, antagonist and/or agonist of the invention to a hypertrophic scar or keloid.

[0650] Within one embodiment of the present invention polynucleotides, polypeptides, antagonists and/or agonists of the invention are directly injected into a hypertrophic scar or keloid, in order to prevent the progression of these lesions. This therapy is of particular value in the prophylactic treatment of conditions which are known to result in the development of hypertrophic scars and keloids (e.g., burns), and is preferably initiated after the proliferative phase has had time to progress (approximately 14 days after the initial injury), but before hypertrophic scar or keloid development. As noted above, the present invention also provides methods for treating neovascular diseases of the eye, including for example, corneal neovascularization, neovascular glaucoma, proliferative diabetic retinopathy, retrolental fibroplasia and macular degeneration.

[0651] Moreover, Ocular disorders associated with neovascularization which can be treated with the polynucleotides and polypeptides of the present invention (including agonists and/or antagonists) include, but are not limited to: neovascular glaucoma, diabetic retinopathy, retinoblastoma, retrolental fibroplasia, uveitis, retinopathy of prematurity macular degeneration, corneal graft neovascularization, as well as other eye inflammatory diseases, ocular tumors and diseases associated with choroidal or iris neovascularization. See, e.g., reviews by Waltman et al., Am. J. OphthaL 85:704-710 (1978) and Gartner et al., Surv. Ophthal. 22:291-312 (1978).

[0652] Thus, within one aspect of the present invention methods are provided for treating neovascular diseases of the eye such as corneal neovascularization (including corneal graft neovascularization), comprising the step of administering to a patient a therapeutically effective amount of a compound (as described above) to the cornea, such that the formation of blood vessels is inhibited. Briefly, the cornea is a tissue which normally lacks blood vessels. In certain pathological conditions however, capillaries may extend into the cornea from the pericorneal vascular plexus of the limbus. When the cornea becomes vascularized, it also becomes clouded, resulting in a decline in the patient's visual acuity. Visual loss may become complete if the cornea completely opacitates. A wide variety of disorders can result in corneal neovascularization, including for example, corneal infections (e.g., trachoma, herpes simplex keratitis, leishmaniasis and onchocerciasis), immunological processes (e.g., graft rejection and Stevens-Johnson's syndrome), alkali burns, trauma, inflammation (of any cause), toxic and nutritional deficiency states, and as a complication of wearing contact lenses.

[0653] Within particularly preferred embodiments of the invention, may be prepared for topical administration in saline (combined with any of the preservatives and antimicrobial agents commonly used in ocular preparations), and administered in eyedrop form. The solution or suspension may be prepared in its pure form and administered several times daily. Alternatively, anti-angiogenic compositions, prepared as described above, may also be administered directly to the cornea. Within preferred embodiments, the anti-angiogenic composition is prepared with a muco-adhesive polymer which binds to cornea. Within further embodiments, the anti-angiogenic factors or anti-angiogenic compositions may be utilized as an adjunct to conventional steroid therapy. Topical therapy may also be useful prophylactically in corneal lesions which are known to have a high probability of inducing an angiogenic response (such as chemical burns). In these instances the treatment, likely in combination with steroids, may be instituted immediately to help prevent subsequent complications.

[0654] Within other embodiments, the compounds described above may be injected directly into the corneal stroma by an ophthalmologist under microscopic guidance. The preferred site of injection may vary with the morphology of the individual lesion, but the goal of the administration would be to place the composition at the advancing front of the vasculature (i.e., interspersed between the blood vessels and the normal cornea). In most cases this would involve perilimbic corneal injection to “protect” the cornea from the advancing blood vessels. This method may also be utilized shortly after a corneal insult in order to prophylactically prevent corneal neovascularization. In this situation the material could be injected in the perilimbic cornea interspersed between the corneal lesion and its undesired potential limbic blood supply. Such methods may also be utilized in a similar fashion to prevent capillary invasion of transplanted corneas. In a sustained-release form injections might only be required 2-3 times per year. A steroid could also be added to the injection solution to reduce inflammation resulting from the injection itself.

[0655] Within another aspect of the present invention, methods are provided for treating neovascular glaucoma, comprising the step of administering to a patient a therapeutically effective amount of a polynucleotide, polypeptide, antagonist and/or agonist to the eye, such that the formation of blood vessels is inhibited. In one embodiment, the compound may be administered topically to the eye in order to treat early forms of neovascular glaucoma. Within other embodiments, the compound may be implanted by injection into the region of the anterior chamber angle. Within other embodiments, the compound may also be placed in any location such that the compound is continuously released into the aqueous humor. Within another aspect of the present invention, methods are provided for treating proliferative diabetic retinopathy, comprising the step of administering to a patient a therapeutically effective amount of a polynucleotide, polypeptide, antagonist and/or agonist to the eyes, such that the formation of blood vessels is inhibited.

[0656] Within particularly preferred embodiments of the invention, proliferative diabetic retinopathy may be treated by injection into the aqueous humor or the vitreous, in order to increase the local concentration of the polynucleotide, polypeptide, antagonist and/or agonist in the retina. Preferably, this treatment should be initiated prior to the acquisition of severe disease requiring photocoagulation.

[0657] Within another aspect of the present invention, methods are provided for treating retrolental fibroplasia, comprising the step of administering to a patient a therapeutically effective amount of a polynucleotide, polypeptide, antagonist and/or agonist to the eye, such that the formation of blood vessels is inhibited. The compound may be administered topically, via intravitreous injection and/or via intraocular implants.

[0658] Additionally, disorders which can be treated with the polynucleotides, polypeptides, agonists and/or agonists include, but are not limited to, hemangioma, arthritis, psoriasis, angiofibroma, atherosclerotic plaques, delayed wound healing, granulations, hemophilic joints, hypertrophic scars, nonunion fractures, Osler-Weber syndrome, pyogenic granuloma, scleroderma, trachoma, and vascular adhesions.

[0659] Moreover, disorders and/or states, which can be treated, prevented, diagnosed, and/or prognosed with the the polynucleotides, polypeptides, agonists and/or agonists of the invention include, but are not limited to, solid tumors, blood born tumors such as leukemias, tumor metastasis, Kaposi's sarcoma, benign tumors, for example hemangiomas, acoustic neuromas, neurofibromas, trachomas, and pyogenic granulomas, rheumatoid arthritis, psoriasis, ocular angiogenic diseases, for example, diabetic retinopathy, retinopathy of prematurity, macular degeneration, corneal graft rejection, neovascular glaucoma, retrolental fibroplasia, rubeosis, retinoblastoma, and uvietis, delayed wound healing, endometriosis, vascluogenesis, granulations, hypertrophic scars (keloids), nonunion fractures, scleroderma, trachoma, vascular adhesions, myocardial angiogenesis, coronary collaterals, cerebral collaterals, arteriovenous malformations, ischemic limb angiogenesis, Osler-Webber Syndrome, plaque neovascularization, telangiectasia, hemophiliac joints, angiofibroma fibromuscular dysplasia, wound granulation, Crohn's disease, atherosclerosis, birth control agent by preventing vascularization required for embryo implantation controlling menstruation, diseases that have angiogenesis as a pathologic consequence such as cat scratch disease (Rochele minalia quintosa), ulcers (Helicobacter pylori), Bartonellosis and bacillary angiomatosis.

[0660] In one aspect of the birth control method, an amount of the compound sufficient to block embryo implantation is administered before or after intercourse and fertilization have occurred, thus providing an effective method of birth control, possibly a “morning after” method. Polynucleotides, polypeptides, agonists and/or agonists may also be used in controlling menstruation or administered as either a peritoneal lavage fluid or for peritoneal implantation in the treatment of endometriosis.

[0661] Polynucleotides, polypeptides, agonists and/or agonists of the present invention may be incorporated into surgical sutures in order to prevent stitch granulomas.

[0662] Polynucleotides, polypeptides, agonists and/or agonists may be utilized in a wide variety of surgical procedures. For example, within one aspect of the present invention a compositions (in the form of, for example, a spray or film) may be utilized to coat or spray an area prior to removal of a tumor, in order to isolate normal surrounding tissues from malignant tissue, and/or to prevent the spread of disease to surrounding tissues. Within other aspects of the present invention, compositions (e.g., in the form of a spray) may be delivered via endoscopic procedures in order to coat tumors, or inhibit angiogenesis in a desired locale. Within yet other aspects of the present invention, surgical meshes which have been coated with anti-angiogenic compositions of the present invention may be utilized in any procedure wherein a surgical mesh might be utilized. For example, within one embodiment of the invention a surgical mesh laden with an anti-angiogenic composition may be utilized during abdominal cancer resection surgery (e.g., subsequent to colon resection) in order to provide support to the structure, and to release an amount of the anti-angiogenic factor.

[0663] Within further aspects of the present invention, methods are provided for treating tumor excision sites, comprising administering a polynucleotide, polypeptide, agonist and/or agonist to the resection margins of a tumor subsequent to excision, such that the local recurrence of cancer and the formation of new blood vessels at the site is inhibited. Within one embodiment of the invention, the anti-angiogenic compound is administered directly to the tumor excision site (e.g., applied by swabbing, brushing or otherwise coating the resection margins of the tumor with the anti-angiogenic compound). Alternatively, the anti-angiogenic compounds may be incorporated into known surgical pastes prior to administration. Within particularly preferred embodiments of the invention, the anti-angiogenic compounds are applied after hepatic resections for malignancy, and after neurosurgical operations.

[0664] Within one aspect of the present invention, polynucleotides, polypeptides, agonists and/or agonists may be administered to the resection margin of a wide variety of tumors, including for example, breast, colon, brain and hepatic tumors. For example, within one embodiment of the invention, anti-angiogenic compounds may be administered to the site of a neurological tumor subsequent to excision, such that the formation of new blood vessels at the site are inhibited.

[0665] The polynucleotides, polypeptides, agonists and/or agonists of the present invention may also be administered along with other anti-angiogenic factors. Representative examples of other anti-angiogenic factors include: Anti-Invasive Factor, retinoic acid and derivatives thereof, paclitaxel, Suramin, Tissue Inhibitor of Metalloproteinase-1, Tissue Inhibitor of Metalloproteinase-2, Plasminogen Activator Inhibitor-1, Plasminogen Activator Inhibitor-2, and various forms of the lighter “d group” transition metals.

[0666] Lighter “d group” transition metals include, for example, vanadium, molybdenum, tungsten, titanium, niobium, and tantalum species. Such transition metal species may form transition metal complexes. Suitable complexes of the above-mentioned transition metal species include oxo transition metal complexes.

[0667] Representative examples of vanadium complexes include oxo vanadium complexes such as vanadate and vanadyl complexes. Suitable vanadate complexes include metavanadate and orthovanadate complexes such as, for example, ammonium metavanadate, sodium metavanadate, and sodium orthovanadate. Suitable vanadyl complexes include, for example, vanadyl acetylacetonate and vanadyl sulfate including vanadyl sulfate hydrates such as vanadyl sulfate mono- and trihydrates.

[0668] Representative examples of tungsten and molybdenum complexes also include oxo complexes. Suitable oxo tungsten complexes include tungstate and tungsten oxide complexes. Suitable tungstate complexes include ammonium tungstate, calcium tungstate, sodium tungstate dihydrate, and tungstic acid. Suitable tungsten oxides include tungsten (IV) oxide and tungsten (VI) oxide. Suitable oxo molybdenum complexes include molybdate, molybdenum oxide, and molybdenyl complexes. Suitable molybdate complexes include ammonium molybdate and its hydrates, sodium molybdate and its hydrates, and potassium molybdate and its hydrates. Suitable molybdenum oxides include molybdenum (VI) oxide, molybdenum (VI) oxide, and molybdic acid. Suitable molybdenyl complexes include, for example, molybdenyl acetylacetonate. Other suitable tungsten and molybdenum complexes include hydroxo derivatives derived from, for example, glycerol, tartaric acid, and sugars.

[0669] A wide variety of other anti-angiogenic factors may also be utilized within the context of the present invention. Representative examples include platelet factor 4; protamine sulphate; sulphated chitin derivatives (prepared from queen crab shells), (Murata et al., Cancer Res. 51:22-26, 1991); Sulphated Polysaccharide Peptidoglycan Complex (SP-PG) (the function of this compound may be enhanced by the presence of steroids such as estrogen, and tamoxifen citrate); Staurosporine; modulators of matrix metabolism, including for example, proline analogs, cishydroxyproline, d,L-3,4-dehydroproline, Thiaproline, alpha,alpha-dipyridyl, aminopropionitrile fumarate; 4-propyl-5-(4-pyridinyl)-2(3H)-oxazolone; Methotrexate; Mitoxantrone; Heparin; Interferons; 2 Macroglobulin-serum; ChIMP-3 (Pavloff et al., J. Bio. Chem. 267:17321-17326, 1992); Chymostatin (Tomkinson et al., Biochem J. 286:475-480, 1992); Cyclodextrin Tetradecasulfate; Eponemycin; Camptothecin; Fumagillin (Ingber et al., Nature 348:555-557, 1990); Gold Sodium Thiomalate (“GST”; Matsubara and Ziff, J. Clin. Invest. 79:1440-1446, 1987); anticollagenase-serum; alpha2-antiplasmin (Holmes et al., J. Biol. Chem. 262(4): 1659-1664, 1987); Bisantrene (National Cancer Institute); Lobenzarit disodium (N-(2)carboxyphenyl -4-chloroanthronilic acid disodium or “CCA”; Takeuchi et al., Agents Actions 36:312-316, 1992); Thalidomide; Angostatic steroid; AGM-1470; carboxynaminolmidazole; and metalloproteinase inhibitors such as BB94.

[0670] Diseases at the Cellular Level

[0671] Diseases associated with increased cell survival or the inhibition of apoptosis that could be treated, prevented, diagnosed, and/or prognosed using polynucleotides or polypeptides, as well as antagonists or agonists of the present invention, include cancers (such as follicular lymphomas, carcinomas with p53 mutations, and hormone-dependent tumors, including, but not limited to colon cancer, cardiac tumors, pancreatic cancer, melanoma, retinoblastoma, glioblastoma, lung cancer, intestinal cancer, testicular cancer, stomach cancer, neuroblastoma, myxoma, myoma, lymphoma, endothelioma, osteoblastoma, osteoclastoma, osteosarcoma, chondrosarcoma, adenoma, breast cancer, prostate cancer, Kaposi's sarcoma and ovarian cancer); autoimmune disorders (such as, multiple sclerosis, Sjogren's syndrome, Hashimoto's thyroiditis, biliary cirrhosis, Behcet's disease, Crohn's disease, polymyositis, systemic lupus erythematosus and immune-related glomerulonephritis and rheumatoid arthritis) and viral infections (such as herpes viruses, pox viruses and adenoviruses), inflammation, graft v. host disease, acute graft rejection, and chronic graft rejection.

[0672] In preferred embodiments, polynucleotides, polypeptides, and/or antagonists of the invention are used to inhibit growth, progression, and/or metasis of cancers, in particular those listed above.

[0673] Additional diseases or conditions associated with increased cell survival that could be treated or detected by polynucleotides or polypeptides, or agonists or antagonists of the present invention include, but are not limited to, progression, and/or metastases of malignancies and related disorders such as leukemia (including acute leukemias (e.g., acute lymphocytic leukemia, acute myelocytic leukemia (including myeloblastic, promyelocytic, myelomonocytic, monocytic, and erythroleukemia)) and chronic leukemias (e.g., chronic myelocytic (granulocytic) leukemia and chronic lymphocytic leukemia)), polycythemia vera, lymphomas (e.g., Hodgkin's disease and non-Hodgkin's disease), multiple myeloma, Waldenstrom's macroglobulinemia, heavy chain disease, and solid tumors including, but not limited to, sarcomas and carcinomas such as fibrosarcoma, myxosarcoma, liposarcoma, chondrosarcoma, osteogenic sarcoma, chordoma, angiosarcoma, endotheliosarcoma, lymphangiosarcoma, lymphangioendotheliosarcoma, synovioma, mesothelioma, Ewing's tumor, leiomyosarcoma, rhabdomyosarcoma, colon carcinoma, pancreatic cancer, breast cancer, ovarian cancer, prostate cancer, squamous cell carcinoma, basal cell carcinoma, adenocarcinoma, sweat gland carcinoma, sebaceous gland carcinoma, papillary carcinoma, papillary adenocarcinomas, cystadenocarcinoma, medullary carcinoma, bronchogenic carcinoma, renal cell carcinoma, hepatoma, bile duct carcinoma, choriocarcinoma, seminoma, embryonal carcinoma, Wilm's tumor, cervical cancer, testicular tumor, lung carcinoma, small cell lung carcinoma, bladder carcinoma, epithelial carcinoma, glioma, astrocytoma, medulloblastoma, craniopharyngioma, ependymoma, pinealoma, hemangioblastoma, acoustic neuroma, oligodendroglioma, menangioma, melanoma, neuroblastoma, and retinoblastoma.

[0674] Diseases associated with increased apoptosis that could be treated, prevented, diagnosed, and/or prognesed using polynucleotides or polypeptides, as well as agonists or antagonists of the present invention, include, but are not limited to, AIDS; neurodegenerative disorders (such as Alzheimer's disease, Parkinson's disease, Amyotrophic lateral sclerosis, Retinitis pigmentosa, Cerebellar degeneration and brain tumor or prior associated disease); autoimmune disorders (such as, multiple sclerosis, Sjogren's syndrome, Hashimoto's thyroiditis, biliary cirrhosis, Behcet's disease, Crohn's disease, polymyositis, systemic lupus erythematosus and immune-related glomerulonephritis and rheumatoid arthritis) myelodysplastic syndromes (such as aplastic anemia), graft v. host disease, ischemic injury (such as that caused by myocardial infarction, stroke and reperfusion injury), liver injury (e.g., hepatitis related liver injury, ischemia/reperfusion injury, cholestosis (bile duct injury) and liver cancer); toxin-induced liver disease (such as that caused by alcohol), septic shock, cachexia and anorexia.

[0675] Wound Healing and Epithelial Cell Proliferation

[0676] In accordance with yet a further aspect of the present invention, there is provided a process for utilizing polynucleotides or polypeptides, as well as agonists or antagonists of the present invention, for therapeutic purposes, for example, to stimulate epithelial cell proliferation and basal keratinocytes for the purpose of wound healing, and to stimulate hair follicle production and healing of dermal wounds. Polynucleotides or polypeptides, as well as agonists or antagonists of the present invention, may be clinically useful in stimulating wound healing including surgical wounds, excisional wounds, deep wounds involving damage of the dermis and epidermis, eye tissue wounds, dental tissue wounds, oral cavity wounds, diabetic ulcers, dermal ulcers, cubitus ulcers, arterial ulcers, venous stasis ulcers, burns resulting from heat exposure or chemicals, and other abnormal wound healing conditions such as uremia, malnutrition, vitamin deficiencies and complications associated with systemic treatment with steroids, radiation therapy and antineoplastic drugs and antimetabolites. Polynucleotides or polypeptides, as well as agonists or antagonists of the present invention, could be used to promote dermal reestablishment subsequent to dermal loss

[0677] Polynucleotides or polypeptides, as well as agonists or antagonists of the present invention, could be used to increase the adherence of skin grafts to a wound bed and to stimulate re-epithelialization from the wound bed. The following are types of grafts that polynucleotides or polypeptides, agonists or antagonists of the present invention, could be used to increase adherence to a wound bed: autografts, artificial skin, allografts, autodermic graft, autoepdermic grafts, avacular grafts, Blair-Brown grafts, bone graft, brephoplastic grafts, cutis graft, delayed graft, dermic graft, epidermic graft, fascia graft, full thickness graft, heterologous graft, xenograft, homologous graft, hyperplastic graft, lamellar graft, mesh graft, mucosal graft, Ollier-Thiersch graft, omenpal graft, patch graft, pedicle graft, penetrating graft, split skin graft, thick split graft. Polynucleotides or polypeptides, as well as agonists or antagonists of the present invention, can be used to promote skin strength and to improve the appearance of aged skin.

[0678] It is believed that polynucleotides or polypeptides, as well as agonists or antagonists of the present invention, will also produce changes in hepatocyte proliferation, and epithelial cell proliferation in the lung, breast, pancreas, stomach, small intestine, and large intestine. Polynucleotides or polypeptides, as well as agonists or antagonists of the present invention, could promote proliferation of epithelial cells such as sebocytes, hair follicles, hepatocytes, type II pneumocytes, mucin-producing goblet cells, and other epithelial cells and their progenitors contained within the skin, lung, liver, and gastrointestinal tract. Polynucleotides or polypeptides, agonists or antagonists of the present invention, may promote proliferation of endothelial cells, keratinocytes, and basal keratinocytes.

[0679] Polynucleotides or polypeptides, as well as agonists or antagonists of the present invention, could also be used to reduce the side effects of gut toxicity that result from radiation, chemotherapy treatments or viral infections. Polynucleotides or polypeptides, as well as agonists or antagonists of the present invention, may have a cytoprotective effect on the small intestine mucosa. Polynucleotides or polypeptides, as well as agonists or antagonists of the present invention, may also stimulate healing of mucositis (mouth ulcers) that result from chemotherapy and viral infections.

[0680] Polynucleotides or polypeptides, as well as agonists or antagonists of the present invention, could further be used in full regeneration of skin in full and partial thickness skin defects, including burns, (i.e., repopulation of hair follicles, sweat glands, and sebaceous glands), treatment of other skin defects such as psoriasis. Polynucleotides or polypeptides, as well as agonists or antagonists of the present invention, could be used to treat epidermolysis bullosa, a defect in adherence of the epidermis to the underlying dermis which results in frequent, open and painful blisters by accelerating reepithelialization of these lesions. Polynucleotides or polypeptides, as well as agonists or antagonists of the present invention, could also be used to treat gastric and doudenal ulcers and help heal by scar formation of the mucosal lining and regeneration of glandular mucosa and duodenal mucosal lining more rapidly. Inflammatory bowel diseases, such as Crohn's disease and ulcerative colitis, are diseases which result in destruction of the mucosal surface of the small or large intestine, respectively. Thus, polynucleotides or polypeptides, as well as agonists or antagonists of the present invention, could be used to promote the resurfacing of the mucosal surface to aid more rapid healing and to prevent progression of inflammatory bowel disease. Treatment with polynucleotides or polypeptides, agonists or antagonists of the present invention, is expected to have a significant effect on the production of mucus throughout the gastrointestinal tract and could be used to protect the intestinal mucosa from injurious substances that are ingested or following surgery. Polynucleotides or polypeptides, as well as agonists or antagonists of the present invention, could be used to treat diseases associate with the under expression.

[0681] Moreover, polynucleotides or polypeptides, as well as agonists or antagonists of the present invention, could be used to prevent and heal damage to the lungs due to various pathological states. Polynucleotides or polypeptides, as well as agonists or antagonists of the present invention, which could stimulate proliferation and differentiation and promote the repair of alveoli and brochiolar epithelium to prevent or treat acute or chronic lung damage. For example, emphysema, which results in the progressive loss of aveoli, and inhalation injuries, i.e., resulting from smoke inhalation and burns, that cause necrosis of the bronchiolar epithelium and alveoli could -be effectively treated using polynucleotides or polypeptides, agonists or antagonists of the present invention. Also, polynucleotides or polypeptides, as well as agonists or antagonists of the present invention, could be used to stimulate the proliferation of and differentiation of type II pneumocytes, which may help treat or prevent disease such as hyaline membrane diseases, such as infant respiratory distress syndrome and bronchopulmonary displasia, in premature infants.

[0682] Polynucleotides or polypeptides, as well as agonists or antagonists of the present invention, could stimulate the proliferation and differentiation of hepatocytes and, thus, could be used to alleviate or treat liver diseases and pathologies such as fulminant liver failure caused by cirrhosis, liver damage caused by viral hepatitis and toxic substances (i.e., acetaminophen, carbon tetraholoride and other hepatotoxins known in the art).

[0683] In addition, polynucleotides or polypeptides, as well as agonists or antagonists of the present invention, could be used treat or prevent the onset of diabetes mellitus. In patients with newly diagnosed Types I and II diabetes, where some islet cell function remains, polynucleotides or polypeptides, as well as agonists or antagonists of the present invention, could be used to maintain the islet function so as to alleviate, delay or prevent permanent manifestation of the disease. Also, polynucleotides or polypeptides, as well as agonists or antagonists of the present invention, could be used as an auxiliary in islet cell transplantation to improve or promote islet cell function.

[0684] Neural Activity and Neurological Diseases

[0685] The polynucleotides, polypeptides and agonists or antagonists of the invention may be used for the diagnosis and/or treatment of diseases, disorders, damage or injury of the brain and/or nervous system. Nervous system disorders that can be treated with the compositions of the invention (e.g., polypeptides, polynucleotides, and/or agonists or antagonists), include, but are not limited to, nervous system injuries, and diseases or disorders which result in either a disconnection of axons, a diminution or degeneration of neurons, or demyelination. Nervous system lesions which may be treated in a patient (including human and non-human mammalian patients) according to the methods of the invention, include but are not limited to, the following lesions of either the central (including spinal cord, brain) or peripheral nervous systems: (1) ischemic lesions, in which a lack of oxygen in a portion of the nervous system results in neuronal injury or death, including cerebral infarction or ischemia, or spinal cord infarction or ischemia; (2) traumatic lesions, including lesions caused by physical injury or associated with surgery, for example, lesions which sever a portion of the nervous system, or compression injuries; (3) malignant lesions, in which a portion of the nervous system is destroyed or injured by malignant tissue which is either a nervous system associated malignancy or a malignancy derived from non-nervous system tissue; (4) infectious lesions, in which a portion of the nervous system is destroyed or injured as a result of infection, for example, by an abscess or associated with infection by human immunodeficiency virus, herpes zoster, or herpes simplex virus or with Lyme disease, tuberculosis, or syphilis; (5) degenerative lesions, in which a portion of the nervous system is destroyed or injured as a result of a degenerative process including but not limited to, degeneration associated with Parkinson's disease, Alzheimer's disease, Huntington's chorea, or amyotrophic lateral sclerosis (ALS); (6) lesions associated with nutritional diseases or disorders, in which a portion of the nervous system is destroyed or injured by a nutritional disorder or disorder of metabolism including, but not limited to, vitamin B12 deficiency, folic acid deficiency, Wemicke disease, tobacco-alcohol amblyopia, Marchiafava-Bignami disease (primary degeneration of the corpus callosum), and alcoholic cerebellar degeneration; (7) neurological lesions associated with systemic diseases including, but not limited to, diabetes (diabetic neuropathy, Bell's palsy), systemic lupus erythematosus, carcinoma, or sarcoidosis; (8) lesions caused by toxic substances including alcohol, lead, or particular neurotoxins; and (9) demyelinated lesions in which a portion of the nervous system is destroyed or injured by a demyelinating disease including, but not limited to, multiple sclerosis, human immunodeficiency virus-associated myelopathy, transverse myelopathy or various etiologies, progressive multifocal leukoencephalopathy, and central pontine myelinolysis.

[0686] In one embodiment, the polypeptides, polynucleotides, or agonists or antagonists of the invention are used to protect neural cells from the damaging effects of hypoxia. In a further preferred embodiment, the polypeptides, polynucleotides, or agonists or antagonists of the invention are used to protect neural cells from the damaging effects of cerebral hypoxia. According to this embodiment, the compositions of the invention are used to treat or prevent neural cell injury associated with cerebral hypoxia. In one non-exclusive aspect of this embodiment, the polypeptides, polynucleotides, or agonists or antagonists of the invention, are used to treat or prevent neural cell injury associated with cerebral ischemia. In another non-exclusive aspect of this embodiment, the polypeptides, polynucleotides, or agonists or antagonists of the invention are used to treat or prevent neural cell injury associated with cerebral infarction.

[0687] In another preferred embodiment, the polypeptides, polynucleotides, or agonists or antagonists of the invention are used to treat or prevent neural cell injury associated with a stroke. In a specific embodiment, the polypeptides, polynucleotides, or agonists or antagonists of the invention are used to treat or prevent cerebral neural cell injury associated with a stroke.

[0688] In another preferred embodiment, the polypeptides, polynucleotides, or agonists or antagonists of the invention are used to treat or prevent neural cell injury associated with a heart attack. In a specific embodiment, the polypeptides, polynucleotides, or agonists or antagonists of the invention are used to treat or prevent cerebral neural cell injury associated with a heart attack.

[0689] The compositions of the invention which are useful for treating or preventing a nervous system disorder may be selected by testing for biological activity in promoting the survival or differentiation of neurons. For example, and not by way of limitation, compositions of the invention which elicit any of the following effects may be useful according to the invention: (1) increased survival time of neurons in culture either in the presence or absence of hypoxia or hypoxic conditions; (2) increased sprouting of neurons in culture or in vivo; (3) increased production of a neuron-associated molecule in culture or in vivo, e.g., choline acetyltransferase or acetylcholinesterase with respect to motor neurons; or (4) decreased symptoms of neuron dysfunction in vivo. Such effects may be measured by any method known in the art. In preferred, non-limiting embodiments, increased survival of neurons may routinely be measured using a method set forth herein or otherwise known in the art, such as, for example, in Zhang et al., Proc Natl Acad Sci USA 97:3637-42 (2000) or in Arakawa et al., J. Neurosci., 10:3507-15 (1990); increased sprouting of neurons may be detected by methods known in the art, such as, for example, the methods set forth in Pestronk et al., Exp. Neurol., 70:65-82 (1980), or Brown et al., Ann. Rev. Neurosci., 4:17-42 (1981); increased production of neuron-associated molecules may be measured by bioassay, enzymatic assay, antibody binding, Northern blot assay, etc., using techniques known in the art and depending on the molecule to be measured; and motor neuron dysfunction may be measured by assessing the physical manifestation of motor neuron disorder, e.g., weakness, motor neuron conduction velocity, or functional disability.

[0690] In specific embodiments, motor neuron disorders that may be treated according to the invention include, but are not limited to, disorders such as infarction, infection, exposure to toxin, trauma, surgical damage, degenerative disease or malignancy that may affect motor neurons as well as other components of the nervous system, as well as disorders that selectively affect neurons such as amyotrophic lateral sclerosis, and including, but not limited to, progressive spinal muscular atrophy, progressive bulbar palsy, primary lateral sclerosis, infantile and juvenile muscular atrophy, progressive bulbar paralysis of childhood (Fazio-Londe syndrome), poliomyelitis and the post polio syndrome, and Hereditary Motorsensory Neuropathy (Charcot-Marie-Tooth Disease).

[0691] Further, polypeptides or polynucleotides of the invention may play a role in neuronal survival; synapse formation; conductance; neural differentiation, etc. Thus, compositions of the invention (including polynucleotides, polypeptides, and agonists or antagonists) may be used to diagnose and/or treat or prevent diseases or disorders associated with these roles, including, but not limited to, learning and/or cognition disorders. The compositions of the invention may also be useful in the treatment or prevention of neurodegenerative disease states and/or behavioural disorders. Such neurodegenerative disease states and/or behavioral disorders include, but are not limited to, Alzheimer's Disease, Parkinson's Disease, Huntington's Disease, Tourette Syndrome, schizophrenia, mania, dementia, paranoia, obsessive compulsive disorder, panic disorder, learning disabilities, ALS, psychoses, autism, and altered behaviors, including disorders in feeding, sleep patterns, balance, and perception. In addition, compositions of the invention may also play a role in the treatment, prevention and/or detection of developmental disorders associated with the developing embryo, or sexually-linked disorders.

[0692] Additionally, polypeptides, polynucleotides and/or agonists or antagonists of the invention, may be useful in protecting neural cells from diseases, damage, disorders, or injury, associated with cerebrovascular disorders including, but not limited to, carotid artery diseases (e.g., carotid artery thrombosis, carotid stenosis, or Moyamoya Disease), cerebral amyloid angiopathy, cerebral aneurysm, cerebral anoxia, cerebral arteriosclerosis, cerebral arteriovenous malformations, cerebral artery diseases, cerebral embolism and thrombosis (e.g., carotid artery thrombosis, sinus thrombosis, or Wallenberg's Syndrome), cerebral hemorrhage (e.g., epidural or subdural hematoma, or subarachnoid hemorrhage), cerebral infarction, cerebral ischemia (e.g., transient cerebral ischemia, Subclavian Steal Syndrome, or vertebrobasilar insufficiency), vascular dementia (e.g., multi-infarct), leukomalacia, periventricular, and vascular headache (e.g., cluster headache or migraines).

[0693] In accordance with yet a further aspect of the present invention, there is provided a process for utilizing polynucleotides or polypeptides, as well as agonists or antagonists of the present invention, for therapeutic purposes, for example, to stimulate neurological cell proliferation and/or differentiation. Therefore, polynucleotides, polypeptides, agonists and/or antagonists of the invention may be used to treat and/or detect neurologic diseases. Moreover, polynucleotides or polypeptides, or agonists or antagonists of the invention, can be used as a marker or detector of a particular nervous system disease or disorder.

[0694] Examples of neurologic diseases which can be treated or detected with polynucleotides, polypeptides, agonists, and/or antagonists of the present invention include brain diseases, such as metabolic brain diseases which includes phenylketonuria such as maternal phenylketonuria, pyruvate carboxylase deficiency, pyruvate dehydrogenase complex deficiency, Wernicke's Encephalopathy, brain edema, brain neoplasms such as cerebellar neoplasms which include infratentorial neoplasms, cerebral ventricle neoplasms such as choroid plexus neoplasms, hypothalamic neoplasms, supratentorial neoplasms, canavan disease, cerebellar diseases such as cerebellar ataxia which include spinocerebellar degeneration such as ataxia telangiectasia, cerebellar dyssynergia, Friederich's Ataxia, Machado-Joseph Disease, olivopontocerebellar atrophy, cerebellar neoplasms such as infratentorial neoplasms, diffuse cerebral sclerosis such as encephalitis periaxialis, globoid cell leukodystrophy, metachromatic leukodystrophy and subacute sclerosing panencephalitis.

[0695] Additional neurologic diseases which can be treated or detected with polynucleotides, polypeptides, agonists, and/or antagonists of the present invention include cerebrovascular disorders (such as carotid artery diseases which include carotid artery thrombosis, carotid stenosis and Moyamoya Disease), cerebral amyloid angiopathy, cerebral aneurysm, cerebral anoxia, cerebral arteriosclerosis, cerebral arteriovenous malformations, cerebral artery diseases, cerebral embolism and thrombosis such as carotid artery thrombosis, sinus thrombosis and Wallenberg's Syndrome, cerebral hemorrhage such as epidural hematoma, subdural hematoma and subarachnoid hemorrhage, cerebral infarction, cerebral ischemia such as transient cerebral ischemia, Subclavian Steal Syndrome and vertebrobasilar insufficiency, vascular dementia such as multi-infarct dementia, periventricular leukomalacia, vascular headache such as cluster headache and migraine.

[0696] Additional neurologic diseases which can be treated or detected with polynucleotides, polypeptides, agonists, and/or antagonists of the present invention include dementia such as AIDS Dementia Complex, presenile dementia such as Alzheimer's Disease and Creutzfeldt-Jakob Syndrome, senile dementia such as Alzheimer's Disease and progressive supranuclear palsy, vascular dementia such as multi-infarct dementia, encephalitis which include encephalitis periaxialis, viral encephalitis such as epidemic encephalitis, Japanese Encephalitis, St. Louis Encephalitis, tick-borne encephalitis and West Nile Fever, acute disseminated encephalomyelitis, meningoencephalitis such as uveomeningoencephalitic syndrome, Postencephalitic Parkinson Disease and subacute sclerosing panencephalitis, encephalomalacia such as periventricular leukomalacia, epilepsy such as generalized epilepsy which includes infantile spasms, absence epilepsy, myoclonic epilepsy which includes MERRF Syndrome, tonic-clonic epilepsy, partial epilepsy such as complex partial epilepsy, frontal lobe epilepsy and temporal lobe epilepsy, post-traumatic epilepsy, status epilepticus such as Epilepsia Partialis Continua, and Hallervorden-Spatz Syndrome.

[0697] Additional neurologic diseases which can be treated or detected with polynucleotides, polypeptides, agonists, and/or antagonists of the present invention include hydrocephalus such as Dandy-Walker Syndrome and normal pressure hydrocephalus, hypothalamic diseases such as hypothalamic neoplasms, cerebral malaria, narcolepsy which includes cataplexy, bulbar poliomyelitis, cerebri pseudotumor, Rett Syndrome, Reye's Syndrome, thalamic diseases, cerebral toxoplasmosis, intracranial tuberculoma and Zellweger Syndrome, central nervous system infections such as AIDS Dementia Complex, Brain Abscess, subdural empyema, encephalomyelitis such as Equine Encephalomyelitis, Venezuelan Equine Encephalomyelitis, Necrotizing Hemorrhagic Encephalomyelitis, Visna, and cerebral malaria.

[0698] Additional neurologic diseases which can be treated or detected with polynucleotides, polypeptides, agonists, and/or antagonists of the present invention include meningitis such as arachnoiditis, aseptic meningtitis such as viral meningtitis which includes lymphocytic choriomeningitis, Bacterial meningtitis which includes Haemophilus Meningtitis, Listeria Meningtitis, Meningococcal Meningtitis such as Waterhouse-Friderichsen Syndrome, Pneumococcal Meningtitis and meningeal tuberculosis, fungal meningitis such as Cryptococcal Meningtitis, subdural effusion, meningoencephalitis such as uvemeningoencephalitic syndrome, myelitis such as transverse myelitis, neurosyphilis such as tabes dorsalis, poliomyelitis which includes bulbar poliomyelitis and postpoliomyelitis syndrome, prion diseases (such as Creutzfeldt-Jakob Syndrome, Bovine Spongiform Encephalopathy, Gerstmann-Straussler Syndrome, Kuru, Scrapie), and cerebral toxoplasmosis.

[0699] Additional neurologic diseases which can be treated or detected with polynucleotides, polypeptides, agonists, and/or antagonists of the present invention include central nervous system neoplasms such as brain neoplasms that include cerebellar neoplasms such as infratentorial neoplasms, cerebral ventricle neoplasms such as choroid plexus neoplasms, hypothalamic neoplasms and supratentorial neoplasms, meningeal neoplasms, spinal cord neoplasms which include epidural neoplasms, demyelinating diseases such as Canavan Diseases, diffuse cerebral sceloris which includes adrenoleukodystrophy, encephalitis periaxialis, globoid cell leukodystrophy, diffuse cerebral sclerosis such as metachromatic leukodystrophy, allergic encephalomyelitis, necrotizing hemorrhagic encephalomyelitis, progressive multifocal leukoencephalopathy, multiple sclerosis, central pontine myelinolysis, transverse myelitis, neuromyelitis optica, Scrapie, Swayback, Chronic Fatigue Syndrome, Visna, High Pressure Nervous Syndrome, Meningism, spinal cord diseases such as amyotonia congenita, amyotrophic lateral sclerosis, spinal muscular atrophy such as Werdnig-Hoffmann Disease, spinal cord compression, spinal cord neoplasms such as epidural neoplasms, syringomyelia, Tabes Dorsalis, Stiff-Man Syndrome, mental retardation such as Angelman Syndrome, Cri-du-Chat Syndrome, De Lange's Syndrome, Down Syndrome, Gangliosidoses such as gangliosidoses G(M1), Sandhoff Disease, Tay-Sachs Disease, Hartnup Disease, homocystinuria, Laurence-Moon-Biedl Syndrome, Lesch-Nyhan Syndrome, Maple Syrup Urine Disease, mucolipidosis such as fucosidosis, neuronal ceroid-lipofuscinosis, oculocerebrorenal syndrome, phenylketonuria such as matemal phenylketonuria, Prader-Willi Syndrome, Rett Syndrome, Rubinstein-Taybi Syndrome, Tuberous Sclerosis, WAGR Syndrome, nervous system abnormalities such as holoprosencephaly, neural tube defects such as anencephaly which includes hydrangencephaly, Arnold-Chairi Deformity, encephalocele, meningocele, meningomyelocele, spinal dysraphism such as spina bifida cystica and spina bifida occulta.

[0700] Additional neurologic diseases which can be treated or detected with polynucleotides, polypeptides, agonists, and/or antagonists of the present invention include hereditary motor and sensory neuropathies which include Charcot-Marie Disease, Hereditary optic atrophy, Refsum's Disease, hereditary spastic paraplegia, Werdnig-Hoffmann Disease, Hereditary Sensory and Autonomic Neuropathies such as Congenital Analgesia and Familial Dysautonomia, Neurologic manifestations (such as agnosia that include Gerstmann's Syndrome, Amnesia such as retrograde amnesia, apraxia, neurogenic bladder, cataplexy, communicative disorders such as hearing disorders that includes deafness, partial hearing loss, loudness recruitment and tinnitus, language disorders such as aphasia which include agraphia, anomia, broca aphasia, and Wemicke Aphasia, Dyslexia such as Acquired Dyslexia, language development disorders, speech disorders such as aphasia which includes anomia, broca aphasia and Wernicke Aphasia, articulation disorders, communicative disorders such as speech disorders which include dysarthria, echolalia, mutism and stuttering, voice disorders such as aphonia and hoarseness, decerebrate state, delirium, fasciculation, hallucinations, meningism, movement disorders such as angelman syndrome, ataxia, athetosis, chorea, dystonia, hypokinesia, muscle hypotonia, myoclonus, tic, torticollis and tremor, muscle hypertonia such as muscle rigidity such as stiff-man syndrome, muscle spasticity, paralysis such as facial paralysis which includes Herpes Zoster Oticus, Gastroparesis, Hemiplegia, ophthalmoplegia such as diplopia, Duane's Syndrome, Horner's Syndrome, Chronic progressive external ophthalmoplegia such as Kearns Syndrome, Bulbar Paralysis, Tropical Spastic Paraparesis, Paraplegia such as Brown-Sequard Syndrome, quadriplegia, respiratory paralysis and vocal cord paralysis, paresis, phantom limb, taste disorders such as ageusia and dysgeusia, vision disorders such as amblyopia, blindness, color vision defects, diplopia, hemianopsia, scotoma and subnormal vision, sleep disorders such as hypersomnia which includes Kleine-Levin Syndrome, insomnia, and somnambulism, spasm such as trismus, unconsciousness such as coma, persistent vegetative state and syncope and vertigo, neuromuscular diseases such as amyotonia congenita, amyotrophic lateral sclerosis, Lambert-Eaton Myasthenic Syndrome, motor neuron disease, muscular atrophy such as spinal muscular atrophy, Charcot-Marie Disease and Werdnig-Hoffmann Disease, Postpoliomyelitis Syndrome, Muscular Dystrophy, Myasthenia Gravis, Myotonia Atrophica, Myotonia Confenita, Nemaline Myopathy, Familial Periodic Paralysis, Multiplex Paramyloclonus, Tropical Spastic Paraparesis and Stiff-Man Syndrome, peripheral nervous system diseases such as acrodynia, amyloid neuropathies, autonomic nervous system diseases such as Adie's Syndrome, Barre-Lieou Syndrome, Familial Dysautonomia, Horner's Syndrome, Reflex Sympathetic Dystrophy and Shy-Drager Syndrome, Cranial Nerve Diseases such as Acoustic Nerve Diseases such as Acoustic Neuroma which includes Neurofibromatosis 2, Facial Nerve Diseases such as Facial Neuralgia,Melkersson-Rosenthal Syndrome, ocular motility disorders which includes amblyopia, nystagmus, oculomotor nerve paralysis, ophthalmoplegia such as Duane's Syndrome, Horner's Syndrome, Chronic Progressive External Ophthalmoplegia which includes Kearns Syndrome, Strabismus such as Esotropia and Exotropia, Oculomotor Nerve Paralysis, Optic Nerve Diseases such as Optic Atrophy which includes Hereditary Optic Atrophy, Optic Disk Drusen, Optic Neuritis such as Neuromyelitis Optica, Papilledema, Trigeminal Neuralgia, Vocal Cord Paralysis, Demyelinating Diseases such as Neuromyelitis Optica and Swayback, and Diabetic neuropathies such as diabetic foot.

[0701] Additional neurologic diseases which can be treated or detected with polynucleotides, polypeptides, agonists, and/or antagonists of the present invention include nerve compression syndromes such as carpal tunnel syndrome, tarsal tunnel syndrome, thoracic outlet syndrome such as cervical rib syndrome, ulnar nerve compression syndrome, neuralgia such as causalgia, cervico-brachial neuralgia, facial neuralgia and trigeminal neuralgia, neuritis such as experimental allergic neuritis, optic neuritis, polyneuritis, polyradiculoneuritis and radiculities such as polyradiculitis, hereditary motor and sensory neuropathies such as Charcot-Marie Disease, Hereditary Optic Atrophy, Refsum's Disease, Hereditary Spastic Paraplegia and Werdnig-Hoffmann Disease, Hereditary Sensory and Autonomic Neuropathies which include Congenital Analgesia and Familial Dysautonomia, POEMS Syndrome, Sciatica, Gustatory Sweating and Tetany).

[0702] Endocrine Disorders

[0703] Polynucleotides or polypeptides, or agonists or antagonists of the present invention, may be used to treat, prevent, diagnose, and/or prognose disorders and/or diseases related to hormone imbalance, and/or disorders or diseases of the endocrine system.

[0704] Hormones secreted by the glands of the endocrine system control physical growth, sexual function, metabolism, and other functions. Disorders may be classified in two ways: disturbances in the production of hormones, and the inability of tissues to respond to hormones. The etiology of these hormone imbalance or endocrine system diseases, disorders or conditions may be genetic, somatic, such as cancer and some autoimmune diseases, acquired (e.g., by chemotherapy, injury or toxins), or infectious. Moreover, polynucleotides, polypeptides, antibodies, and/or agonists or antagonists of the present invention can be used as a marker or detector of a particular disease or disorder related to the endocrine system and/or hormone imbalance.

[0705] Endocrine system and/or hormone imbalance and/or diseases encompass disorders of uterine motility including, but not limited to: complications with pregnancy and labor (e.g., pre-term labor, post-term pregnancy, spontaneous abortion, and slow or stopped labor); and disorders and/or diseases of the menstrual cycle (e.g., dysmenorrhea and endometriosis).

[0706] Endocrine system and/or hormone imbalance disorders and/or diseases include disorders and/or diseases of the pancreas, such as, for example, diabetes mellitus, diabetes insipidus, congenital pancreatic agenesis, pheochromocytoma—islet cell tumor syndrome; disorders and/or diseases of the adrenal glands such as, for example, Addison's Disease, corticosteroid deficiency, virilizing disease, hirsutism, Cushing's Syndrome, hyperaldosteronism, pheochromocytoma; disorders and/or diseases of the pituitary gland, such as, for example, hyperpituitarism, hypopituitarism, pituitary dwarfism, pituitary adenoma, panhypopituitarism, acromegaly, gigantism; disorders and/or diseases of the thyroid, including but not limited to, hyperthyroidism, hypothyroidism, Plummer's disease, Graves' disease (toxic diffuse goiter), toxic nodular goiter, thyroiditis (Hashimoto's thyroiditis, subacute granulomatous thyroiditis, and silent lymphocytic thyroiditis), Pendred's syndrome, myxedema, cretinism, thyrotoxicosis, thyroid hormone coupling defect, thymic aplasia, Hurthle cell tumours of the thyroid, thyroid cancer, thyroid carcinoma, Medullary thyroid carcinoma; disorders and/or diseases of the parathyroid, such as, for example, hyperparathyroidism, hypoparathyroidism; disorders and/or diseases of the hypothalamus.

[0707] In addition, endocrine system and/or hormone imbalance disorders and/or diseases may also include disorders and/or diseases of the testes or ovaries, including cancer. Other disorders and/or diseases of the testes or ovaries further include, for example, ovarian cancer, polycystic ovary syndrome, Klinefelter's syndrome, vanishing testes syndrome (bilateral anorchia), congenital absence of Leydig's cells, cryptorchidism, Noonan's syndrome, myotonic dystrophy, capillary haemangioma of the testis (benign), neoplasias of the testis and neo-testis.

[0708] Moreover, endocrine system and/or hormone imbalance disorders and/or diseases may also include disorders and/or diseases such as, for example, polyglandular deficiency syndromes, pheochromocytoma, neuroblastoma, multiple Endocrine neoplasia, and disorders and/or cancers of endocrine tissues.

[0709] In another embodiment, a polypeptide of the invention, or polynucleotides, antibodies, agonists, or antagonists corresponding to that polypeptide, may be used to diagnose, prognose, prevent, and/or treat endocrine diseases and/or disorders associated with the tissue(s) in which the polypeptide of the invention is expressed, including one, two, three, four, five, or more tissues disclosed in Table 1A, column 8 (Tissue Distribution Library Code).

[0710] Reproductive System Disorders

[0711] The polynucleotides or polypeptides, or agonists or antagonists of the invention may be used for the diagnosis, treatment, or prevention of diseases and/or disorders of the reproductive system. Reproductive system disorders that can be treated by the compositions of the invention, include, but are not limited to, reproductive system injuries, infections, neoplastic disorders, congenital defects, and diseases or disorders which result in infertility, complications with pregnancy, labor, or parturition, and postpartum difficulties.

[0712] Reproductive system disorders and/or diseases include diseases and/or disorders of the testes, including testicular atrophy, testicular feminization, cryptorchism (unilateral and bilateral), anorchia, ectopic testis, epididymitis and orchitis (typically resulting from infections such as, for example, gonorrhea, mumps, tuberculosis, and syphilis), testicular torsion, vasitis nodosa, germ cell tumors (e.g., seminomas, embryonal cell carcinomas, teratocarcinomas, choriocarcinomas, yolk sac tumors, and teratomas), stromal tumors (e.g., Leydig cell tumors), hydrocele, hematocele, varicocele, spermatocele, inguinal hernia, and disorders of sperm production (e.g., immotile cilia syndrome, aspermia, asthenozoospermia, azoospermia, oligospermia, and teratozoospermia).

[0713] Reproductive system disorders also include disorders of the prostate gland, such as acute non-bacterial prostatitis, chronic non-bacterial prostatitis, acute bacterial prostatitis, chronic bacterial prostatitis, prostatodystonia, prostatosis, granulomatous prostatitis, malacoplakia, benign prostatic hypertrophy or hyperplasia, and prostate neoplastic disorders, including adenocarcinomas, transitional cell carcinomas, ductal carcinomas, and squamous cell carcinomas.

[0714] Additionally, the compositions of the invention may be useful in the diagnosis, treatment, and/or prevention of disorders or diseases of the penis and urethra, including inflammatory disorders, such as balanoposthitis, balanitis xerotica obliterans, phimosis, paraphimosis, syphilis, herpes simplex virus, gonorrhea, non-gonococcal urethritis, chlamydia, mycoplasma, trichomonas, HIV, AIDS, Reiter's syndrome, condyloma acuminatum, condyloma latum, and pearly penile papules; urethral abnormalities, such as hypospadias, epispadias, and phimosis; premalignant lesions, including Erythroplasia of Queyrat, Bowen's disease, Bowenoid paplosis, giant condyloma of Buscke-Lowenstein, and varrucous carcinoma; penile cancers, including squamous cell carcinomas, carcinoma in situ, verrucous carcinoma, and disseminated penile carcinoma; urethral neoplastic disorders, including penile urethral carcinoma, bulbomembranous urethral carcinoma, and prostatic urethral carcinoma; and erectile disorders, such as priapism, Peyronie's disease, erectile dysfunction, and impotence.

[0715] Moreover, diseases and/or disorders of the vas deferens include vasculititis and CBAVD (congenital bilateral absence of the vas deferens); additionally, the polynucleotides, polypeptides, and agonists or antagonists of the present invention may be used in the diagnosis, treatment, and/or prevention of diseases and/or disorders of the seminal vesicles, including hydatid disease, congenital chloride diarrhea, and polycystic kidney disease.

[0716] Other disorders and/or diseases of the male reproductive system include, for example, Klinefelter's syndrome, Young's syndrome, premature ejaculation, diabetes mellitus, cystic fibrosis, Kartagener's syndrome, high fever, multiple sclerosis, and gynecomastia.

[0717] Further, the polynucleotides, polypeptides, and agonists or antagonists of the present invention may be used in the diagnosis, treatment, and/or prevention of diseases and/or disorders of the vagina and vulva, including bacterial vaginosis, candida vaginitis, herpes simplex virus, chancroid, granuloma inguinale, lymphogranuloma venereum, scabies, human papillomavirus, vaginal trauma, vulvar trauma, adenosis, chlamydia vaginitis, gonorrhea, trichomonas vaginitis, condyloma acuminatum, syphilis, molluscum contagiosum, atrophic vaginitis, Paget's disease, lichen sclerosus, lichen planus, vulvodynia, toxic shock syndrome, vaginismus, vulvovaginitis, vulvar vestibulitis, and neoplastic disorders, such as squamous cell hyperplasia, clear cell carcinoma, basal cell carcinoma, melanomas, cancer of Bartholin's gland, and vulvar intraepithelial neoplasia.

[0718] Disorders and/or diseases of the uterus include dysmenorrhea, retroverted uterus, endometriosis, fibroids, adenomyosis, anovulatory bleeding, amenorrhea, Cushing's syndrome, hydatidiform moles, Asherman's syndrome, premature menopause, precocious puberty, uterine polyps, dysfunctional uterine bleeding (e.g., due to aberrant hormonal signals), and neoplastic disorders, such as adenocarcinomas, keiomyosarcomas, and sarcomas. Additionally, the polypeptides, polynucleotides, or agonists or antagonists of the invention may be useful as a marker or detector of, as well as in the diagnosis, treatment, and/or prevention of congenital uterine abnormalities, such as bicornuate uterus, septate uterus, simple unicornuate uterus, unicornuate uterus with a noncavitary rudimentary horn, unicornuate uterus with a non-communicating cavitary rudimentary horn, unicornuate uterus with a communicating cavitary horn, arcuate uterus, uterine didelfus, and T-shaped uterus.

[0719] Ovarian diseases and/or disorders include anovulation, polycystic ovary syndrome (Stein-Leventhal syndrome), ovarian cysts, ovarian hypofunction, ovarian insensitivity to gonadotropins, ovarian overproduction of androgens, right ovarian vein syndrome, amenorrhea, hirutism, and ovarian cancer (including, but not limited to, primary and secondary cancerous growth, Sertoli-Leydig tumors, endometriod carcinoma of the ovary, ovarian papillary serous adenocarcinoma, ovarian mucinous adenocarcinoma, and Ovarian Krukenberg tumors).

[0720] Cervical diseases and/or disorders include cervicitis, chronic cervicitis, mucopurulent cervicitis, cervical dysplasia, cervical polyps, Nabothian cysts, cervical erosion, cervical incompetence, and cervical neoplasms (including, for example, cervical carcinoma, squamous metaplasia, squamous cell carcinoma, adenosquamous cell neoplasia, and columnar cell neoplasia).

[0721] Additionally, diseases and/or disorders of the reproductive system include disorders and/or diseases of pregnancy, including miscarriage and stillbirth, such as early abortion, late abortion, spontaneous abortion, induced abortion, therapeutic abortion, threatened abortion, missed abortion, incomplete abortion, complete abortion, habitual abortion, missed abortion, and septic abortion; ectopic pregnancy, anemia, Rh incompatibility, vaginal bleeding during pregnancy, gestational diabetes, intrauterine growth retardation, polyhydramnios, HELLP syndrome, abruptio placentae, placenta previa, hyperemesis, preeclampsia, eclampsia, herpes gestationis, and urticaria of pregnancy. Additionally, the polynucleotides, polypeptides, and agonists or antagonists of the present invention may be used in the diagnosis, treatment, and/or prevention of diseases that can complicate pregnancy, including heart disease, heart failure, rheumatic heart disease, congenital heart disease, mitral valve prolapse, high blood pressure, anemia, kidney disease, infectious disease (e.g., rubella, cytomegalovirus, toxoplasmosis, infectious hepatitis, chlamydia, HIV, AIDS, and genital herpes), diabetes mellitus, Graves' disease, thyroiditis, hypothyroidism, Hashimoto's thyroiditis, chronic active hepatitis, cirrhosis of the liver, primary biliary cirrhosis, asthma, systemic lupus eryematosis, rheumatoid arthritis, myasthenia gravis, idiopathic thrombocytopenic purpura, appendicitis, ovarian cysts, gallbladder disorders, and obstruction of the intestine.

[0722] Complications associated with labor and parturition include premature rupture of the membranes, pre-term labor, post-term pregnancy, postmaturity, labor that progresses too slowly, fetal distress (e.g., abnormal heart rate (fetal or maternal), breathing problems, and abnormal fetal position), shoulder dystocia, prolapsed umbilical cord, amniotic fluid embolism, and aberrant uterine bleeding.

[0723] Further, diseases and/or disorders of the postdelivery period, including endometritis, myometritis, parametritis, peritonitis, pelvic thrombophlebitis, pulmonary embolism, endotoxemia, pyelonephritis, saphenous thrombophlebitis, mastitis, cystitis, postpartum hemorrhage, and inverted uterus.

[0724] Other disorders and/or diseases of the female reproductive system that may be diagnosed, treated, and/or prevented by the polynucleotides,, polypeptides, and agonists or antagonists of the present invention include, for example, Turner's syndrome, pseudohermaphroditism, premenstrual syndrome, pelvic inflammatory disease, pelvic congestion (vascular engorgement), frigidity, anorgasmia, dyspareunia, ruptured fallopian tube, and Mittelschmerz.

[0725] Infectious Disease

[0726] Polynucleotides or polypeptides, as well as agonists or antagonists of the present invention can be used to treat or detect infectious agents. For example, by increasing the immune response, particularly increasing the proliferation and differentiation of B and/or T cells, infectious diseases may be treated. The immune response may be increased by either enhancing an existing immune response, or by initiating a new immune response. Alternatively, polynucleotides or polypeptides, as well as agonists or antagonists of the present invention may also directly inhibit the infectious agent, without necessarily eliciting an immune response.

[0727] Viruses are one example of an infectious agent that can cause disease or symptoms that can be treated or detected by a polynucleotide or polypeptide and/or agonist or antagonist of the present invention. Examples of viruses, include, but are not limited to Examples of viruses, include, but are not limited to the following DNA and RNA viruses and viral families: Arbovirus, Adenoviridae, Arenaviridae, Arterivirus, Bimaviridae, Bunyaviridae, Caliciviridae, Circoviridae, Coronaviridae, Dengue, EBV, HIV, Flaviviridae, Hepadnaviridae (Hepatitis), Herpesviridae (such as, Cytomegalovirus, Herpes Simplex, Herpes Zoster), Mononegavirus (e.g., Paramyxoviridae, Morbillivirus, Rhabdoviridae), Orthomyxoviridae (e.g., Influenza A, Influenza B, and parainfluenza), Papiloma virus, Papovaviridae, Parvoviridae, Picornaviridae, Poxviridae (such as Smallpox or Vaccinia), Reoviridae (e.g., Rotavirus), Retroviridae (HTLV-I, HTLV-II, Lentivirus), and Togaviridae (e.g., Rubivirus). Viruses falling within these families can cause a variety of diseases or symptoms, including, but not limited to: arthritis, bronchiollitis, respiratory syncytial virus, encephalitis, eye infections (e.g., conjunctivitis, keratitis), chronic fatigue syndrome, hepatitis (A, B, C, E, Chronic Active, Delta), Japanese B encephalitis, Junin, Chikungunya, Rift Valley fever, yellow fever, meningitis, opportunistic infections (e.g., AIDS), pneumonia, Burkitt's Lymphoma, chickenpox, hemorrhagic fever, Measles, Mumps, Parainfluenza, Rabies, the common cold, Polio, leukemia, Rubella, sexually transmitted diseases, skin diseases (e.g., Kaposi's, warts), and viremia. polynucleotides or polypeptides, or agonists or antagonists of the invention, can be used to treat or detect any of these symptoms or diseases. In specific embodiments, polynucleotides, polypeptides, or agonists or antagonists of the invention are used to treat: meningitis, Dengue, EBV, and/or hepatitis (e.g., hepatitis B). In an additional specific embodiment polynucleotides, polypeptides, or agonists or antagonists of the invention are used to treat patients nonresponsive to one or more other commercially available hepatitis vaccines. In a further specific embodiment polynucleotides, polypeptides, or agonists or antagonists of the invention are used to treat AIDS.

[0728] Similarly, bacterial and fungal agents that can cause disease or symptoms and that can be treated or detected by a polynucleotide or polypeptide and/or agonist or antagonist of the present invention include, but not limited to, the following Gram-Negative and Gram-positive bacteria, bacterial families, and fungi: Actinomyces (e.g., Norcardia), Acinetobacter, Cryptococcus neoformans, Aspergillus, Bacillaceae (e.g., Bacillus anthrasis), Bacteroides (e.g., Bacteroides fragilis), Blastomycosis, Bordetella, Borrelia (e.g., Borrelia burgdorferi), Brucella, Candidia, Campylobacter, Chlamydia, Clostridium (e.g., Clostridium botulinum, Clostridium dificile, Clostridium perfringens, Clostridium tetani), Coccidioides, Corynebacterium (e.g., Corynebacterium diptheriae), Cryptococcus, Dermatocycoses, E. coli (e.g., Enterotoxigenic E. coli and Enterohemorrhagic E. coli), Enterobacter (e.g. Enterobacter aerogenes), Enterobacteriaceae (Klebsiella, Salmonella (e.g., Salmonella typhi, Salmonella enteritidis, Salmonella typhi), Serratia, Yersinia, Shigella), Erysipelothrix, Haemophilus (e.g., Haemophilus influenza type B), Helicobacter, Legionella (e.g., Legionella pneumophila), Leptospira, Listeria (e.g., Listeria monocytogenes), Mycoplasma, Mycobacterium (e.g., Mycobacterium leprae and Mycobacterium tuberculosis), Vibrio (e.g., Vibrio cholerae), Neisseriaceae (e.g., Neisseria gonorrhea, Neisseria meningitidis), Pasteurellacea, Proteus, Pseudomonas (e.g., Pseudomonas aeruginosa), Rickettsiaceae, Spirochetes (e.g., Treponema spp., Leptospira spp., Borrelia spp.), Shigella spp., Staphylococcus (e.g., Staphylococcus aureus), Meningiococcus, Pneumococcus and Streptococcus (e.g., Streptococcus pneumoniae and Groups A, B, and C Streptococci), and Ureaplasmas. These bacterial, parasitic, and fungal families can cause diseases or symptoms, including, but not limited to: antibiotic-resistant infections, bacteremia, endocarditis, septicemia, eye infections (e.g., conjunctivitis), uveitis, tuberculosis, gingivitis, bacterial diarrhea, opportunistic infections (e.g., AIDS related infections), paronychia, prosthesis-related infections, dental caries, Reiter's Disease, respiratory tract infections, such as Whooping Cough or Empyema, sepsis, Lyme Disease, Cat-Scratch Disease, dysentery, paratyphoid fever, food poisoning, Legionella disease, chronic and acute inflammation, erythema, yeast infections, typhoid, pneumonia, gonorrhea, meningitis (e.g., mengitis types A and B), chlamydia, syphillis, diphtheria, leprosy, brucellosis, peptic ulcers, anthrax, spontaneous abortions, birth defects, pneumonia, lung infections, ear infections, deafness, blindness, lethargy, malaise, vomiting, chronic diarrhea, Crohn's disease, colitis, vaginosis, sterility, pelvic inflammatory diseases, candidiasis, paratuberculosis, tuberculosis, lupus, botulism, gangrene, tetanus, impetigo, Rheumatic Fever, Scarlet Fever, sexually transmitted diseases, skin diseases (e.g., cellulitis, dermatocycoses), toxemia, urinary tract infections, wound infections, noscomial infections. Polynucleotides or polypeptides, agonists or antagonists of the invention, can be used to treat or detect any of these symptoms or diseases. In specific embodiments, polynucleotides, polypeptides, agonists or antagonists of the invention are used to treat: tetanus, diptheria, botulism, and/or meningitis type B.

[0729] Moreover, parasitic agents causing disease or symptoms that can be treated, prevented, and/or diagnosed by a polynucleotide or polypeptide and/or agonist or antagonist of the present invention include, but not limited to, the following families or class: Amebiasis, Babesiosis, Coccidiosis, Cryptosporidiosis, Dientamoebiasis, Dourine, Ectoparasitic, Giardias, Helminthiasis, Leishmaniasis, Schistisoma, Theileriasis, Toxoplasmosis, Trypanosomiasis, and Trichomonas and Sporozoans (e.g., Plasmodium virax, Plasmodium falciparium, Plasmodium malariae and Plasmodium ovale). These parasites can cause a variety of diseases or symptoms, including, but not limited to: Scabies, Trombiculiasis, eye infections, intestinal disease (e.g., dysentery, giardiasis), liver disease, lung disease, opportunistic infections (e.g., AIDS related), malaria, pregnancy complications, and toxoplasmosis. polynucleotides or polypeptides, or agonists or antagonists of the invention, can be used to treat, prevent, and/or diagnose any of these symptoms or diseases. In specific embodiments, polynucleotides, polypeptides, or agonists or antagonists of the invention are used to treat, prevent, and/or diagnose malaria.

[0730] Polynucleotides or polypeptides, as well as agonists or antagonists of the present invention of the present invention could either be by administering an effective amount of a polypeptide to the patient, or by removing cells from the patient, supplying the cells with a polynucleotide of the present invention, and returning the engineered cells to the patient (ex vivo therapy). Moreover, the polypeptide or polynucleotide of the present invention can be used as an antigen in a vaccine to raise an immune response against infectious disease.

[0731] Regeneration

[0732] Polynucleotides or polypeptides, as well as agonists or antagonists of the present invention can be used to differentiate, proliferate, and attract cells, leading to the regeneration of tissues. (See, Science 276:59-87 (1997)). The regeneration of tissues could be used to repair, replace, or protect tissue damaged by congenital defects, trauma (wounds, burns, incisions, or ulcers), age, disease (e.g. osteoporosis, osteocarthritis, periodontal disease, liver failure), surgery, including cosmetic plastic surgery, fibrosis, reperfusion injury, or systemic cytokine damage.

[0733] Tissues that could be regenerated using the present invention include organs (e.g., pancreas, liver, intestine, kidney, skin, endothelium), muscle (smooth, skeletal or cardiac), vasculature (including vascular and lymphatics), nervous, hematopoietic, and skeletal (bone, cartilage, tendon, and ligament) tissue. Preferably, regeneration occurs without or decreased scarring. Regeneration also may include angiogenesis.

[0734] Moreover, polynucleotides or polypeptides, as well as agonists or antagonists of the present invention, may increase regeneration of tissues difficult to heal. For example, increased tendon/ligament regeneration would quicken recovery time after damage. Polynucleotides or polypeptides, as well as agonists or antagonists of the present invention could also be used prophylactically in an effort to avoid damage. Specific diseases that could be treated include of tendinitis, carpal tunnel syndrome, and other tendon or ligament defects. A further example of tissue regeneration of non-healing wounds includes pressure ulcers, ulcers associated with vascular insufficiency, surgical, and traumatic wounds.

[0735] Similarly, nerve and brain tissue could also be regenerated by using polynucleotides or polypeptides, as well as agonists or antagonists of the present invention, to proliferate and differentiate nerve cells. Diseases that could be treated using this method include central and peripheral nervous system diseases, neuropathies, or mechanical and traumatic disorders (e.g., spinal cord disorders, head trauma, cerebrovascular disease, and stoke). Specifically, diseases associated with peripheral nerve injuries, peripheral neuropathy (e.g., resulting from chemotherapy or other medical therapies), localized neuropathies, and central nervous system diseases (e.g., Alzheimer's disease, Parkinson's disease, Huntington's disease, amyotrophic lateral sclerosis, and Shy-Drager syndrome), could all be treated using the polynucleotides or polypeptides, as well as agonists or antagonists of the present invention.

[0736] Gastrointestinal Disorders

[0737] Polynucleotides or polypeptides, or agonists or antagonists of the present invention, may be used to treat, prevent, diagnose, and/or prognose gastrointestinal disorders, including inflammatory diseases and/or conditions, infections, cancers (e.g., intestinal neoplasms (carcinoid tumor of the small intestine, non-Hodgkin's lymphoma of the small intestine, small bowl lymphoma)), and ulcers, such as peptic ulcers.

[0738] Gastrointestinal disorders include dysphagia, odynophagia, inflammation of the esophagus, peptic esophagitis, gastric reflux, submucosal fibrosis and stricturing, Mallory-Weiss lesions, leiomyomas, lipomas, epidermal cancers, adeoncarcinomas, gastric retention disorders, gastroenteritis, gastric atrophy, gastric/stomach cancers, polyps of the stomach, autoimmune disorders such as pernicious anemia, pyloric stenosis, gastritis (bacterial, viral, eosinophilic, stress-induced, chronic erosive, atrophic, plasma cell, and Menetrier's), and peritoneal diseases (e.g., chyloperioneum, hemoperitoneum, mesenteric cyst, mesenteric lymphadenitis, mesenteric vascular occlusion, panniculitis, neoplasms, peritonitis, pneumoperitoneum, bubphrenic abscess,).

[0739] Gastrointestinal disorders also include disorders associated with the -small intestine, such as malabsorption syndromes, distension, irritable bowel syndrome, sugar intolerance, celiac disease, duodenal ulcers, duodenitis, tropical sprue, Whipple's disease, intestinal lymphangiectasia, Crohn's disease, appendicitis, obstructions of the ileum, Meckel's diverticulum, multiple diverticula, failure of complete rotation of the small and large intestine, lymphoma, and bacterial and parasitic diseases (such as Traveler's diarrhea, typhoid and paratyphoid, cholera, infection by Roundworms (Ascariasis lumbricoides), Hookworms (Ancylostoma duodenale), Threadworms (Enterobius vermicularis), Tapeworms (Taenia saginata, Echinococcus granulosus, Diphyllobothrium spp., and T. solium).

[0740] Liver diseases and/or disorders include intrahepatic cholestasis (alagille syndrome, biliary liver cirrhosis), fatty liver (alcoholic fatty liver, reye syndrome), hepatic vein thrombosis, hepatolentricular degeneration, hepatomegaly, hepatopulmonary syndrome, hepatorenal syndrome, portal hypertension (esophageal and gastric varices), liver abscess (amebic liver abscess), liver cirrhosis (alcoholic, biliary and experimental), alcoholic liver diseases (fatty liver, hepatitis, cirrhosis), parasitic (hepatic echinococcosis, fascioliasis, amebic liver abscess), jaundice (hemolytic, hepatocellular, and cholestatic), cholestasis, portal hypertension, liver enlargement, ascites, hepatitis (alcoholic hepatitis, animal hepatitis, chronic hepatitis (autoimmune, hepatitis B, hepatitis C, hepatitis D, drug induced), toxic hepatitis, viral human hepatitis (hepatitis A, hepatitis B, hepatitis C, hepatitis D, hepatitis E), Wilson's disease, granulomatous hepatitis, secondary biliary cirrhosis, hepatic encephalopathy, portal hypertension, varices, hepatic encephalopathy, primary biliary cirrhosis, primary sclerosing cholangitis, hepatocellular adenoma, hemangiomas, bile stones, liver failure (hepatic encephalopathy, acute liver failure), and liver neoplasms (angiomyolipoma, calcified liver metastases, cystic liver metastases, epithelial tumors, fibrolamellar hepatocarcinoma, focal nodular hyperplasia, hepatic adenoma, hepatobiliary cystadenoma, hepatoblastoma, hepatocellular carcinoma, hepatoma, liver cancer, liver hemangioendothelioma, mesenchymal hamartoma, mesenchymal tumors of liver, nodular regenerative hyperplasia, benign liver tumors (Hepatic cysts [Simple cysts, Polycystic liver disease, Hepatobiliary cystadenoma, Choledochal cyst], Mesenchymal tumors [Mesenchymal hamartoma, Infantile hemangioendothelioma, Hemangioma, Peliosis hepatis, Lipomas, Inflammatory pseudotumor, Miscellaneous], Epithelial tumors [Bile duct epithelium (Bile duct hamartoma, Bile duct adenoma), Hepatocyte (Adenoma, Focal nodular hyperplasia, Nodular regenerative hyperplasia)], malignant liver tumors [hepatocellular, hepatoblastoma, hepatocellular carcinoma, cholangiocellular, cholangiocarcinoma, cystadenocarcinoma, tumors of blood vessels, angiosarcoma, Karposi's sarcoma, hemangioendothelioma, other tumors, embryonal sarcoma, fibrosarcoma, leiomyosarcoma, rhabdomyosarcoma, carcinosarcoma, teratoma, carcinoid, squamous carcinoma, primary lymphoma]), peliosis hepatis, erythrohepatic porphyria, hepatic porphyria (acute intermittent porphyria, porphyria cutanea tarda), Zellweger syndrome).

[0741] Pancreatic diseases and/or disorders include acute pancreatitis, chronic pancreatitis (acute necrotizing pancreatitis, alcoholic pancreatitis), neoplasms (adenocarcinoma of the pancreas, cystadenocarcinoma, insulinoma, gastrinoma, and glucagonoma, cystic neoplasms, islet-cell tumors, pancreoblastoma), and other pancreatic diseases (e.g., cystic fibrosis, cyst (pancreatic pseudocyst, pancreatic fistula, insufficiency)).

[0742] Gallbladder diseases include gallstones (cholelithiasis and choledocholithiasis), postcholecystectomy syndrome, diverticulosis of the gallbladder, acute cholecystitis, chronic cholecystitis, bile duct tumors, and mucocele.

[0743] Diseases and/or disorders of the large intestine include antibiotic-associated colitis, diverticulitis, ulcerative colitis, acquired megacolon, abscesses, fungal and bacterial infections, anorectal disorders (e.g., fissures, hemorrhoids), colonic diseases (colitis, colonic neoplasms [colon cancer, adenomatous colon polyps (e.g., villous adenoma), colon carcinoma, colorectal cancer], colonic diverticulitis, colonic diverticulosis, megacolon [Hirschsprung disease, toxic megacolon]; sigmoid diseases [proctocolitis, sigmoin neoplasms]), constipation, Crohn's disease, diarrhea (infantile diarrhea, dysentery), duodenal diseases (duodenal neoplasms, duodenal obstruction, duodenal ulcer, duodenitis), enteritis (enterocolitis), HIV enteropathy, ileal diseases (ileal neoplasms, ileitis), immunoproliferative small intestinal disease, inflammatory bowel disease (ulcerative colitis, Crohn.'s disease), intestinal atresia, parasitic diseases (anisakiasis, balantidiasis, blastocystis infections, cryptosporidiosis, dientamoebiasis, amebic dysentery, giardiasis), intestinal fistula (rectal fistula), intestinal neoplasms (cecal neoplasms, colonic neoplasms, duodenal neoplasms, ileal neoplasms, intestinal polyps, jejunal neoplasms, rectal neoplasms), intestinal obstruction (afferent loop syndrome, duodenal obstruction, impacted feces, intestinal pseudo-obstruction [cecal volvulus], intussusception), intestinal perforation, intestinal polyps (colonic polyps, gardner syndrome, peutz-jeghers syndrome), jejunal diseases (jejunal neoplasms), malabsorption syndromes (blind lobp syndrome, celiac disease, lactose-intolerance, short bowl syndrome, tropical sprue, whipple's disease), mesenteric vascular occlusion, pneumatosis cystoides intestinalis, protein-losing enteropathies (intestinal lymphagiectasis), rectal diseases (anus diseases, fecal incontinence, hemorrhoids, proctitis, rectal fistula, rectal prolapse, rectocele), peptic ulcer (duodenal ulcer, peptic esophagitis, hemorrhage, perforation, stomach ulcer, Zollinger-Ellison syndrome), postgastrectomy syndromes (dumping syndrome), stomach diseases (e.g., acblorhydria, duodenogastric reflux (bile reflux), gastric antral vascular ectasia, gastric fistula, gastric outlet obstruction, gastritis (atrophic or hypertrophic), gastroparesis, stomach dilatation, stomach diverticulum, stomach neoplasms (gastric cancer, gastric polyps, gastric adenocarcinoma, hyperplastic gastric polyp), stomach rupture, stomach ulcer, stomach volvulus), tuberculosis, visceroptosis, vomiting (e.g., hematemesis, hyperemesis gravidarum, postoperative nausea and vomiting) and hemorrhagic colitis.

[0744] Further diseases and/or disorders of the gastrointestinal system include biliary tract diseases, such as, gastroschisis, fistula (e.g., biliary fistula, esophageal fistula, gastric fistula, intestinal fistula, pancreatic fistula), neoplasms (e.g., biliary tract neoplasms, esophageal neoplasms, such as adenocarcinoma of the esophagus, esophageal squamous cell carcinoma, gastrointestinal neoplasms, pancreatic neoplasms, such as adenocarcinoma of the pancreas, mucinous cystic neoplasm of the pancreas, pancreatic cystic neoplasms, pancreatoblastoma, and peritoneal neoplasms), esophageal disease (e.g., bullous diseases, candidiasis, glycogenic acanthosis, ulceration, barrett esophagus varices, atresia, cyst, diverticulum (e.g., Zenker's diverticulum), fistula (e.g., tracheoesophageal fistula), motility disorders (e.g., CREST syndrome, deglutition disorders, achalasia, spasm, gastroesophageal reflux), neoplasms, perforation (e.g., Boerhaave syndrome, Mallory-Weiss syndrome), stenosis, esophagitis, diaphragmatic hernia (e.g., hiatal hernia); gastrointestinal diseases, such as, gastroenteritis (e.g., cholera morbus, norwalk virus infection), hemorrhage (e.g., hematemesis, melena, peptic ulcer hemorrhage), stomach neoplasms (gastric cancer, gastric polyps, gastric adenocarcinoma, stomach cancer)), hernia (e.g., congenital diaphragmatic hernia, femoral hernia, inguinal hernia, obturator hernia, umbilical hernia, ventral hernia), and intestinal diseases (e.g., cecal diseases (appendicitis, cecal neoplasms)).

[0745] Chemotaxis

[0746] Polynucleotides or polypeptides, as well as agonists or antagonists of the present invention may have chemotaxis activity. A chemotaxic molecule attracts or mobilizes cells (e.g., monocytes, fibroblasts, neutrophils, T-cells, mast cells, eosinophils, epithelial and/or endothelial cells) to a particular site in the body, such as inflammation, infection, or site of hyperproliferation. The mobilized cells can then fight off and/or heal the particular trauma or abnormality.

[0747] Polynucleotides or polypeptides, as well as agonists or antagonists of the present invention may increase chemotaxic activity of particular cells. These chemotactic molecules can then be used to treat inflammation, infection, hyperproliferative disorders, or any immune system disorder by increasing the number of cells targeted to a particular location in the body. For example, chemotaxic molecules can be used to treat wounds and other trauma to tissues by attracting immune cells to the injured location. Chemotactic molecules of the present invention can also attract fibroblasts, which can be used to treat wounds.

[0748] It is also contemplated that polynucleotides or polypeptides, as well as agonists or antagonists of the present invention may inhibit chemotactic activity. These molecules could also be used to treat disorders. Thus, polynucleotides or polypeptides, as well as agonists or antagonists of the present invention could be used as an inhibitor of chemotaxis.

[0749] Binding Activity

[0750] A polypeptide of the present invention may be used to screen for molecules that bind to the polypeptide or for molecules to which the polypeptide binds. The binding of the polypeptide and the molecule may activate (agonist), increase, inhibit (antagonist), or decrease activity of the polypeptide or the molecule bound. Examples of such molecules include antibodies, oligonucleotides, proteins (e.g., receptors),or small molecules.

[0751] Preferably, the molecule is closely related to the natural ligand of the polypeptide, e.g., a fragment of the ligand, or a natural substrate, a ligand, a structural or functional mimetic. (See, Coligan et al., Current Protocols in Immunology 1(2):Chapter 5 (1991)). Similarly, the molecule can be closely related to the natural receptor to which the polypeptide binds, or at least, a fragment of the receptor capable of being bound by the polypeptide (e.g., active site). In either case, the molecule can be rationally designed using known techniques.

[0752] Preferably, the screening for these molecules involves producing appropriate cells which express the polypeptide. Preferred cells include cells from mammals, yeast, Drosophila, or E. coli. Cells expressing the polypeptide (or cell membrane containing the expressed polypeptide) are then preferably contacted with a test compound potentially containing the molecule to observe binding, stimulation, or inhibition of activity of either the polypeptide or the molecule.

[0753] The assay may simply test binding of a candidate compound to the polypeptide, wherein binding is detected by a label, or in an assay involving competition with a labeled competitor. Further, the assay may test whether the candidate compound results in a signal generated by binding to the polypeptide.

[0754] Alternatively, the assay can be carried out using cell-free preparations, polypeptidelmolecule affixed to a solid support, chemical libraries, or natural product mixtures. The assay may also simply comprise the steps of mixing a candidate compound with a solution containing a polypeptide, measuring polypeptide/molecule activity or binding, and comparing the polypeptide/molecule activity or binding to a standard.

[0755] Preferably, an ELISA assay can measure polypeptide level or activity in a sample (e.g., biological sample) using a monoclonal or polyclonal antibody. The antibody can measure polypeptide level or activity by either binding, directly or indirectly, to the polypeptide or by competing with the polypeptide for a substrate.

[0756] Additionally, the receptor to which the polypeptide of the present invention binds can be identified by numerous methods known to those of skill in the art, for example, ligand panning and FACS sorting (Coligan, et al., Current Protocols in Immun., 1(2), Chapter 5, (1991)). For example, expression cloning is employed wherein polyadenylated RNA is prepared from a cell responsive to the polypeptides, for example, NIH3T3 cells which are known to contain multiple receptors for the FGF family proteins, and SC-3 cells, and a cDNA library created from this RNA is divided into pools and used to transfect COS cells or other cells that are not responsive to the polypeptides. Transfected cells which are grown on glass slides are exposed to the polypeptide of the present invention, after they have been labeled. The polypeptides can be labeled by a variety of means including iodination or inclusion of a recognition site for a site-specific protein kinase.

[0757] Following fixation and incubation, the slides are subjected to auto-radiographic analysis. Positive pools are identified and sub-pools are prepared and re-transfected using an iterative sub-pooling and re-screening process, eventually yielding a single clones that encodes the putative receptor.

[0758] As an alternative approach for receptor identification, the labeled polypeptides can be photoaffinity linked with cell membrane or extract preparations that express the receptor molecule. Cross-linked material is resolved by PAGE analysis and exposed to X-ray film. The labeled complex containing the receptors of the polypeptides can be excised, resolved into peptide fragments, and subjected to protein microsequencing. The amino acid sequence obtained from microsequencing would be used to design a set of degenerate oligonucleotide probes to screen a cDNA library to identify the genes encoding the putative receptors.

[0759] Moreover, the techniques of gene-shuffling, motif-shuffling, exon-shuffling, and/or codon-shuffling (collectively referred to as “DNA shuffling”) may be employed to modulate the activities of the polypeptide of the present invention thereby effectively generating agonists and antagonists of the polypeptide of the present invention. See generally, U.S. Pat. Nos. 5,605,793, 5,811,238, 5,830,721, 5,834,252, and 5,837,458, and Patten, P. A., et al., Curr. Opinion Biotechnol. 8:724-33 (1997); Harayama, S. Trends Biotechnol. 16(2): 76-82 (1998); Hansson, L. O., et al., J. Mol. Biol. 287:265-76 (1999); and Lorenzo, M. M. and Blasco, R. Biotechniques 24(2): 308-13 (1998); each of these patents and publications are hereby incorporated by reference). In one embodiment, alteration of polynucleotides and corresponding polypeptides may be achieved by DNA shuffling. DNA shuffling involves the assembly of two or more DNA segments into a desired molecule by homologous, or site-specific, recombination. In another embodiment, polynucleotides and corresponding polypeptides may be altered by being subjected to random mutagenesis by error-prone PCR, random nucleotide insertion or other methods prior to recombination. In another embodiment, one or more components, motifs, sections, parts, domains, fragments, etc., of the polypeptide of the present invention may be recombined with one or more components, motifs, sections, parts, domains, fragments, etc. of one or more heterologous molecules. In preferred embodiments, the heterologous molecules are family members. In further preferred embodiments, the heterologous molecule is a growth factor such as, for example, platelet-derived growth factor (PDGF), insulin-like growth factor (IGF-1), transforming growth factor (TGF)-alpha, epidermal growth factor (EGF), fibroblast growth factor (FGF), TGF-beta, bone morphogenetic protein (BMP)-2, BMP-4, BMP-5, BMP-6, BMP-7, activins A and B, decapentaplegic(dpp), 60A, OP-2, dorsalin, growth differentiation factors (GDFs), nodal, MIS, inhibin-alpha, TGF-betal, TGF-beta2, TGF-beta3, TGF-beta5, and glial-derived neurotrophic factor (GDNF).

[0760] Other preferred fragments are biologically active fragments of the polypeptide of the present invention. Biologically active fragments are those exhibiting activity similar, but not necessarily identical, to an activity of the polypeptide of the present invention. The biological activity of the fragments may include an improved desired activity, or a decreased undesirable activity.

[0761] Additionally, this invention provides a method of screening compounds to identify those which modulate the action of the polypeptide of the present invention. An example of such an assay comprises combining a mammalian fibroblast cell, a the polypeptide of the present invention, the compound to be screened and ³[H] thymidine under cell culture conditions where the fibroblast cell would normally proliferate. A control assay may be performed in the absence of the compound to be screened and compared to the amount of fibroblast proliferation in the presence of the compound to determine if the compound stimulates proliferation by determining the uptake of ³[H] thymidine in each case. The amount of fibroblast cell proliferation is measured by liquid scintillation chromatography which measures the incorporation of ³[H] thymidine. Both agonist and antagonist compounds may be identified by this procedure.

[0762] In another method, a mammalian cell or membrane preparation expressing a receptor for a polypeptide of the present invention is incubated with a labeled polypeptide of the present invention in the presence of the compound. The ability of the compound to enhance or block this interaction could then be measured. Alternatively, the response of a known second messenger system following interaction of a compound to be screened and the receptor is measured and the ability of the compound to bind to the receptor and elicit a second messenger response is measured to determine if the compound is a potential agonist or antagonist. Such second messenger systems include but are not limited to, cAMP guanylate cyclase, ion channels or phosphoinositide hydrolysis.

[0763] All of these above assays can be used as diagnostic or prognostic markers. The molecules discovered using these assays can be used to treat disease or to bring about a particular result in a patient (e.g., blood vessel growth) by activating or inhibiting the polypeptide/molecule. Moreover, the assays can discover agents which may inhibit or enhance the production of the polypeptides of the invention from suitably manipulated cells or tissues.

[0764] Therefore, the invention includes a method of identifying compounds which bind to a polypeptide of the invention comprising the steps of: (a) incubating a candidate binding compound with a polypeptide of the present invention; and (b) determining if binding has occurred. Moreover, the invention includes a method of identifying agonists/antagonists comprising the steps of: (a) incubating a candidate compound with a polypeptide of the present invention, (b) assaying a biological activity, and (b) determining if a biological activity of the polypeptide has been altered.

[0765] Targeted Delivery

[0766] In another embodiment, the invention provides a method of delivering compositions to targeted cells expressing a receptor for a polypeptide of the invention, or cells expressing a cell bound form of a polypeptide of the invention.

[0767] As discussed herein, polypeptides or antibodies of the invention may be associated with heterologous polypeptides, heterologous nucleic acids, toxins, or prodrugs via hydrophobic, hydrophilic, ionic and/or covalent interactions. In one embodiment, the invention provides a method for the specific delivery of compositions of the invention to cells by administering polypeptides of the invention (including antibodies) that are associated with heterologous polypeptides or nucleic acids. In one example, the invention provides a method for delivering a therapeutic protein into the targeted cell. In another example, the invention provides a method for delivering a single stranded nucleic acid (e.g., antisense or ribozymes) or double stranded nucleic acid (e.g., DNA that can integrate into the cell's genome or replicate episomally and that can be transcribed) into the targeted cell.

[0768] In another embodiment, the invention provides a method for the specific destruction of cells (e.g., the destruction of tumor cells) by administering polypeptides of the invention (e.g., polypeptides of the invention or antibodies of the invention) in association with toxins or cytotoxic prodrugs.

[0769] By “toxin” is meant compounds that bind and activate endogenous cytotoxic effector systems, radioisotopes, holotoxins, modified toxins, catalytic subunits of toxins, or any molecules or enzymes not normally present in or on the surface of a cell that under defined conditions cause the cell's death. Toxins that may be used according to the methods of the invention include, but are not limited to, radioisotopes known in the art, compounds such as, for example, antibodies (or complement fixing containing portions thereof) that bind an inherent or induced endogenous cytotoxic effector system, thymidine kinase, endonuclease, RNAse, alpha toxin, ricin, abrin, Pseudomonas exotoxin A, diphtheria toxin, saporin, momordin, gelonin, pokeweed antiviral protein, alpha-sarcin and cholera toxin. By “cytotoxic prodrug” is meant a non-toxic compound that is converted by an enzyme, normally present in the cell, into a cytotoxic compound. Cytotoxic prodrugs that may be used according to the methods of the invention include, but are not limited to, glutamyl derivatives of benzoic acid mustard alkylating agent, phosphate derivatives of etoposide or mitomycin C, cytosine arabinoside, daunorubisin, and phenoxyacetamide derivatives of doxorubicin.

[0770] Drug Screening

[0771] Further contemplated is the use of the polypeptides of the present invention, or the polynucleotides encoding these polypeptides, to screen for molecules which modify the activities of the polypeptides of the present invention. Such a method would include contacting the polypeptide of the present invention with a selected compound(s) suspected of having antagonist or agonist activity, and assaying the activity of these polypeptides following binding.

[0772] This invention is particularly useful for screening therapeutic compounds by using the polypeptides of the present invention, or binding fragments thereof, in any of a variety of drug screening techniques. The polypeptide or fragment employed in such a test may be affixed to a solid support, expressed on a cell surface, free in solution, or located intracellularly. One method of drug screening utilizes eukaryotic or prokaryotic host cells which are stably transformed with recombinant nucleic acids expressing the polypeptide or fragment. Drugs are screened against such transformed cells in competitive binding assays. One may measure, for example, the formulation of complexes between the agent being tested and a polypeptide of the present invention.

[0773] Thus, the present invention provides methods of screening for drugs or any other agents which affect activities mediated by the polypeptides of the present invention. These methods comprise contacting such an agent with a polypeptide of the present invention or a fragment thereof and assaying for the presence of a complex between the agent and the polypeptide or a fragment thereof, by methods well known in the art. In such a competitive binding assay, the agents to screen are typically labeled. Following incubation, free agent is separated from that present in bound form, and the amount of free or uncomplexed label is a measure of the ability of a particular agent to bind to the polypeptides of the present invention.

[0774] Another technique for drug screening provides high throughput screening for compounds having suitable binding affinity to the polypeptides of the present invention, and is described in great detail in European Patent Application 84/03564, published on Sep. 13, 1984, which is incorporated herein by reference herein. Briefly stated, large numbers of different small peptide test compounds are synthesized on a solid substrate, such as plastic pins or some other surface. The peptide test compounds are reacted with polypeptides of the present invention and washed. Bound polypeptides are then detected by methods well known in the art. Purified polypeptides are coated directly onto plates for use in the aforementioned drug screening techniques. In addition, non-neutralizing antibodies may be used to capture the peptide and immobilize it on the solid support.

[0775] This invention also contemplates the use of competitive drug screening assays in which neutralizing antibodies capable of binding polypeptides of the present invention specifically compete with a test compound for binding to the polypeptides or fragments thereof. In this manner, the antibodies are used to detect the presence of any peptide which shares one or more antigenic epitopes with a polypeptide of the invention.

[0776] Antisense and Ribozyme (Antagonists)

[0777] In specific embodiments, antagonists according to the present invention are nucleic acids corresponding to the sequences contained in SEQ ID NO:X, or the complementary strand thereof, and/or to cDNA sequences contained in cDNA Clone ID NO:Z identified for example, in Table 1A. In one embodiment, antisense sequence is generated internally, by the organism, in another embodiment, the antisense sequence is separately administered (see, for example, O'Connor, J., Neurochem. 56:560 (1991). Oligodeoxynucleotides as Antisense Inhibitors of Gene Expression, CRC Press, Boca Raton, Fla. (1988). Antisense technology can be used to control gene expression through antisense DNA or RNA, or through triple-helix formation. Antisense techniques are discussed for example, in Okano, J., Neurochem. 56:560 (1991); Oligodeoxynucleotides as Antisense Inhibitors of Gene Expression, CRC Press, Boca Raton, Fla. (1988). Triple helix formation is discussed in, for instance, Lee et al., Nucleic Acids Research 6:3073 (1979); Cooney et al., Science 241:456 (1988); and Dervan et al., Science 251:1300 (1991). The methods are based on binding of a polynucleotide to a complementary DNA or RNA.

[0778] For example, the use of c-myc and c-myb antisense RNA constructs to inhibit the growth of the non-lymphocytic leukemia cell line HL-60 and other cell lines wag previously described. (Wickstrom et al. (1988); Anfossi et al. (1989)). These experiments were performed in vitro by incubating cells with the oligoribonucleotide. A similar procedure for in vivo use is described in WO 91/15580. Briefly, a pair of oligonucleotides for a given antisense RNA is produced as follows: A sequence complimentary to the first 15 bases of the open reading frame is flanked by an EcoR1 site on the 5 end and a HindIII site on the 3 end. Next, the pair of oligonucleotides is heated at 90° C. for one minute and then annealed in 2× ligation buffer (20 mM TRIS HCl pH 7.5, lOmM MgCl2, 10MM dithiothreitol (DTT) and 0.2 mM ATP) and then ligated to the EcoRl/Hind III site of the retroviral vector PMV7 (WO 91/15580).

[0779] For example, the 5′ coding portion of a polynucleotide that encodes the polypeptide of the present invention may be used to design an antisense RNA oligonucleotide of from about 10 to 40 base pairs in length. A DNA oligonucleotide is designed to be complementary to a region of the gene involved in transcription thereby preventing transcription and the production of the receptor. The antisense RNA oligonucleotide hybridizes to the mRNA in vivo and blocks translation of the mRNA molecule into receptor polypeptide.

[0780] In one embodiment, the antisense nucleic acid -of the invention is produced intracellularly by transcription from an exogenous sequence. For example, a vector or a portion thereof, is transcribed, producing an antisense nucleic acid (RNA) of the invention. Such a vector would contain a sequence encoding the antisense nucleic acid. Such a vector can remain episomal or become chromosomally integrated, as long as it can be transcribed to produce the desired antisense RNA. Such vectors can be constructed by recombinant DNA technology methods standard in the art. Vectors can be plasmid, viral, or others known in the art, used for replication and expression in vertebrate cells. Expression of the sequence encoding the polypeptide of the present invention or fragments thereof, can be by any promoter known in the art to act in vertebrates preferably human cells. Such promoters can be inducible or constitutive. Such promoters include, but are not limited to, the SV40 early promoter region (Bernoist and Chambon, Nature 29:304-310 (1981), the promoter contained in the 3′ long terminal repeat of Rous sarcoma virus (Yamamoto et al., Cell 22:787-797 (1980), the herpes thymidine promoter (Wagner et al., Proc. Natl. Acad. Sci. U.S.A. 78:1441-1445 (1981), the regulatory sequences of the metallothionein gene (Brinster, et al., Nature 296:3942 (1982)), etc.

[0781] The antisense nucleic acids of the invention comprise a sequence complementary to at least a portion of an RNA transcript of a gene of the present invention. However, absolute complementarity, although preferred, is not required. A sequence “complementary to at least a portion of an RNA,” referred to herein, means a sequence having sufficient complementarity to be able to hybridize with the RNA, forming a stable duplex; in the case of double stranded antisense nucleic acids, a single strand of the duplex DNA may thus be tested, or triplex formation may be assayed. The ability to hybridize will depend on both the degree of complementarity and the length of the antisense nucleic acid. Generally, the larger the hybridizing nucleic acid, the more base mismatches with a RNA it may contain and still form a stable duplex (or triplex as the case may be). One skilled in the art can ascertain a tolerable degree of mismatch by use of standard procedures to determine the melting point of the hybridized complex.

[0782] Oligonucleotides that are complementary to the 5′ end of the message, e.g., the 5′ untranslated sequence up to and including the AUG initiation codon, should work most efficiently at inhibiting translation. However, sequences complementary to the 3′ untranslated sequences of mRNAs have been shown to be effective at inhibiting translation of mRNAs as well. See generally, Wagner, R., 1994, Nature 372:333-335. Thus, oligonucleotides complementary to either the 5′- or 3′- non-translated, non-coding regions of polynucleotide sequences described herein could be used in an antisense approach to inhibit translation of endogenous mRNA. Oligonucleotides complementary to the 5′ untranslated region of the mRNA should include the complement of the AUG start codon. Antisense oligonucleotides complementary to mRNA coding regions are less efficient inhibitors of translation but could be used in accordance with the invention. Whether designed to hybridize to the 5′-, 3′- or coding region of mRNA of the present invention, antisense nucleic acids should be at least six nucleotides in length, and are preferably Qligonucleotides ranging from 6 to about 50 nucleotides in length. In specific aspects the oligonucleotide is at least 10 nucleotides, at least 17 nucleotides, at least 25 nucleotides or at least 50 nucleotides.

[0783] The polynucleotides of the invention can be DNA or RNA or chimeric mixtures or derivatives or modified versions thereof, single-stranded or double-stranded. The oligonucleotide can be modified at the base moiety, sugar moiety, or phosphate backbone, for example, to improve stability of the molecule, hybridization, etc. The oligonucleotide may include other appended groups such as peptides (e.g., for targeting host cell receptors in vivo), or agents facilitating transport across the cell membrane (see, e.g., Letsinger et al., 1989, Proc. Natl.-Acad. Sci. U.S.A. 86:6553-6556; Lemaitre et al., 1987, Proc. Natl. Acad. Sci. 84:648-652; PCT Publication No. WO88/09810, published December 15, 1988) or the blood-brain barrier (see, e.g., PCT Publication No. WO89/10134, published April 25, 1988), hybridization-triggered cleavage agents. (See, e.g., Krol et al., 1988, BioTechniques 6:958-976) or intercalating agents. (See, e.g., Zon, 1988, Pharm. Res. 5:539-549). To this end, the oligonucleotide may be conjugated to another molecule, e.g., a peptide, hybridization triggered cross-linking agent, transport agent, hybridization-triggered cleavage agent, etc.

[0784] The antisense oligonucleotide may comprise at least one modified base moiety which is selected from the group including, but not limited to, 5-fluorouracil, 5-bromouracil, 5-chlorouracil, 5-iodouracil, hypoxanthine, xantine, 4-acetylcytosine, 5-(carboxyhydroxylmethyl) uracil, 5-carboxymethylaminomethyl-2-thiouridine, 5-carboxymethylaminomethyluracil, dihydrouracil, beta-D-galactosylqueosine, inosine, N6-isopentenyladenine, 1-methylguanine, 1-methylinosine, 2,2-dimethylguanine, 2-methyladenine, 2-methylguanine, 3-methylcytosine, 5-methylcytosine, N6-adenine, 7-methylguanine, 5-methylaminomethyluracil, 5-methoxyaminomethyl-2-thiouracil, beta-D-mannosylqueosine, 5′-methoxycarboxymethyluracil, 5-methoxyuracil, 2-methylthio-N6-isopentenyladenine, uracil-5-oxyacetic acid (v), wybutoxosine, pseudouracil, queosine, 2-thiocytosine, 5-methyl-2-thiouracil, 2-thiouracil, 4-thiouracil, 5-methyluracil, uracil-5-oxyacetic acid methylester, uracil-5-oxyacetic acid (v), 5-methyl-2-thiouracil, 3-(3-amino-3-N-2-carboxypropyl) uracil, (acp3)w, and 2,6-diaminopurine.

[0785] The antisense oligonucleotide may also comprise at least one modified sugar moiety selected from the group including, but not limited to, arabinose, 2-fluoroarabinose, xylulose, and hexose.

[0786] In yet another embodiment, the antisense oligonucleotide comprises at least one modified phosphate backbone selected from the group including, but not limited to, a phosphorothioate, a phosphorodithioate, a phosphoramidothioate, a phosphoramidate, a phosphordiamidate, a methylphosphonate, an alkyl phosphotriester, and a formacetal or analog thereof.

[0787] In yet another embodiment, the antisense oligonucleotide is an a-anomeric oligonucleotide. An a-anomeric oligonucleotide forms specific double-stranded hybrids with complementary RNA in which, contrary to the usual b-units, the strands run parallel to each other (Gautier et al., 1987, Nucl. Acids Res. 15:6625-6641). The oligonucleotide is a 2′-O-methylribonucleotide (Inoue et al., 1987, Nucl. Acids Res. 15:6131-6148), or a chimeric RNA-DNA analogue (Inoue et al., 1987, FEBS Lett. 215:327-330).

[0788] Polynucleotides of the invention may be synthesized by standard methods known in the art, e.g. by use of an automated DNA synthesizer (such as are commercially available from Biosearch, Applied Biosystems, etc.). As examples, phosphorothioate oligonucleotides may be synthesized by the method of Stein et al. (1988, Nucl. Acids Res. 16:3209), methylphosphonate oligonucleotides can be prepared by use of controlled pore glass polymer supports (Sarin et al., 1988, Proc. Natl. Acad. Sci. U.S.A. 85:7448-7451), etc.

[0789] While antisense nucleotides complementary to the coding region sequence could be used, those complementary to the transcribed untranslated region are most preferred.

[0790] Potential antagonists according to the invention also include catalytic RNA, or a ribozyme (See, e.g., PCT International Publication WO 90/11364, published October 4, 1990; Sarver et al, Science 247:1222-1225 (1990). While ribozymes that cleave mRNA at site specific recognition sequences can be used to destroy mRNAs, the use of hammerhead ribozymes is preferred. Hammerhead ribozymes cleave mRNAs at locations dictated by flanking regions that form complementary base pairs with the target mRNA. The sole requirement is that the target mRNA have the following sequence of two bases: 5′-UG-3′. The construction and production of hammerhead ribozymes is well known in the art and is described more fully in Haseloff and Gerlach, Nature 334:585-591 (1988). There are numerous potential hammerhead ribozyme cleavage sites within the nucleotide sequence of SEQ ID NO:X. Preferably, the ribozyme is engineered so that the cleavage recognition site is located near the 5′ end of the mRNA; i.e., to increase efficiency and minimize the intracellular accumulation of non-functional mRNA transcripts.

[0791] As in the antisense approach, the ribozymes of the invention can be composed of modified oligonucleotides (e.g., for improved stability, targeting, etc.) and should be delivered to cells which express in vivo. DNA constructs encoding the ribozyme may be introduced into the cell in the same manner as described above for the introduction of antisense encoding DNA. A preferred method of delivery involves using a DNA construct “encoding” the ribozyme under the control of a strong constitutive promoter, such as, for example, pol III or pol II promoter, so that transfected cells will produce sufficient quantities of the ribozyme to destroy endogenous messages and inhibit translation. Since ribozymes unlike antisense molecules, are catalytic, a lower intracellular concentration is required for efficiency.

[0792] Antagonist/agonist compounds may be employed to inhibit the cell growth and proliferation effects of the polypeptides of the present invention on neoplastic cells and tissues, i.e. stimulation of angiogenesis of tumors, and, therefore, retard or prevent abnormal cellular growth and proliferation, for example, in tumor formation or growth.

[0793] The antagonist/agonist may also be employed to prevent hyper-vascular diseases, and prevent the proliferation of epithelial lens cells after extracapsular cataract surgery. Prevention of the mitogenic activity of the polypeptides of the present invention may also be desirous in cases such as restenosis after balloon angioplasty.

[0794] The antagonist/agonist may also be employed to prevent the growth of scar tissue during wound healing.

[0795] The antagonist/agonist may also be employed to treat the diseases described herein.

[0796] Thus, the invention provides a method of treating disorders or diseases, including but not limited to the disorders or diseases listed throughout this application, associated with overexpression of a polynucleotide of the present invention by administering to a patient (a) an antisense molecule directed to the polynucleotide of the present invention, and/or (b) a ribozyme directed to the polynucleotide of the present invention.

[0797] Binding Peptides and Other Molecules

[0798] The invention also encompasses screening methods for identifying polypeptides and nonpolypeptides that bind polypeptides of the invention, and the binding molecules identified thereby. These binding molecules are useful, for example, as agonists and antagonists of the polypeptides of the invention. Such agonists and antagonists can be used, in accordance with the invention, in the therapeutic embodiments described in detail, below.

[0799] This method comprises the steps of:

[0800] a. contacting polypeptides of the invention with a plurality of molecules; and

[0801] b. identifying a molecule that binds the polypeptides of the invention.

[0802] The step of contacting the polypeptides of the invention with the plurality of molecules may be effected in a number of ways. For example, one may contemplate inunobilizing the polypeptides on a solid support and bringing a solution of the plurality of molecules in contact with the immobilized polypeptides. Such a procedure would be akin to an affinity chromatographic process, with the affinity matrix being comprised of the immobilized polypeptides of the invention. The molecules having a selective affinity for the polypeptides can then be purified by affinity selection. The nature of the solid support, process for attachment of the polypeptides to the solid support, solvent, and conditions of the affinity isolation or selection are largely conventional and well known to those of ordinary skill in the art.

[0803] Alternatively, one may also separate a plurality of polypeptides into substantially separate fractions comprising a subset of or individual polypeptides. For instance, one can separate the plurality of polypeptides by gel electrophoresis, column chromatography, or like method known to those of ordinary skill for the separation of polypeptides. The individual polypeptides can also be produced by a transformed host cell in such a way as to be expressed on or about its outer surface (e.g., a recombinant phage). Individual isolates can then be “probed” by the polypeptides of the invention, optionally in the presence of an inducer should one be required for expression, to determine if any selective affinity interaction takes place between the polypeptides and the individual clone. Prior to contacting the polypeptides with each fraction comprising individual polypeptides, the polypeptides could first be transferred to a solid support for additional convenience. Such a solid support may simply be a piece of filter membrane, such as one made of nitrocellulose or nylon. In this manner, positive clones could be identified from a collection of transformed host cells of an expression library, which harbor a DNA construct encoding a polypeptide having a selective affinity for polypeptides of the invention. Furthermore, the amino acid sequence of the polypeptide having a selective affinity for the polypeptides of the invention can be determined directly by conventional means or the coding sequence of the DNA encoding the polypeptide can frequently be determined more conveniently. The primary sequence can then be deduced from the corresponding DNA sequence. If the amino acid sequence is to be determined from the polypeptide itself, one may use microsequencing techniques. The sequencing technique may include mass spectroscopy.

[0804] In certain situations, it may be desirable to wash away any unbound polypeptides from a mixture of the polypeptides of the invention and the plurality of polypeptides prior to attempting to determine or to detect the presence of a selective affinity interaction. Such a wash step may be particularly desirable when the polypeptides of the invention or the plurality of polypeptides are bound to a solid support.

[0805] The plurality of molecules provided according to this method may be provided by way of diversity libraries, such as random or combinatorial peptide or nonpeptide libraries which can be screened for molecules that specifically bind polypeptides of the invention. Many libraries are known in the art that can be used, e.g., chemically synthesized libraries, recombinant (e.g., phage display libraries), and in vitro translation-based libraries. Examples of chemically synthesized libraries are described in Fodor et al., 1991, Science 251:767-773; Houghten et al., 1991, Nature 354:84-86; Lam et al., 1991, Nature 354:82-84; Medynski, 1994, Bio/Technology 12:709-710;Gallop et al., 1994, J. Medicinal Chemistry 37(9): 1233-1251; Ohlmeyer et al., 1993, Proc. Natl. Acad. Sci. USA 90:10922-10926; Erb et al., 1994, Proc. Natl. Acad. Sci. USA 91:11422-11426; Houghten et al., 1992, Biotechniques 13:412; Jayawickreme et al., 1994, Proc. Natl. Acad. Sci. USA 91:1614-1618; Salmon et al., 1993, Proc. Natl. Acad. Sci. USA 90:11708-11712; PCT Publication No. WO 93/20242; and Brenner and Lerner, 1992, Proc. Natl. Acad. Sci. USA 89:5381-5383.

[0806] Examples of phage display libraries are described in Scott and Smith, 1990, Science 249:386-390; Devlin et al., 1990, Science, 249:404-406; Christian, R. B., et al., 1992, J. Mol. Biol. 227:711-718); Lenstra, 1992, J. Immunol. Meth. 152:149-157; Kay et al., 1993, Gene 128:59-65; and PCT Publication No. WO 94/18318 dated Aug. 18, 1994.

[0807] In vitro translation-based libraries include but are not limited to those described in PCT Publication No. WO 91/05058 dated Apr. 18, 1991; and Mattheakis et al., 1994, Proc. Natl. Acad. Sci. USA 91:9022-9026.

[0808] By way of examples of nonpeptide libraries, a benzodiazepine library (see e.g., Bunin et al., 1994, Proc. Natl. Acad. Sci. USA 91:4708-4712) can be adapted for use. Peptoid libraries (Simon et al., 1992, Proc. Natl. Acad. Sci. USA 89:9367-9371) can also be used. Another example of a library that can be used, in which the amide functionalities in peptides have been permethylated to generate a chemically transformed combinatorial library, is described by Ostresh et al. (1994, Proc. Natl. Acad. Sci. USA 91:11138-11142).

[0809] The variety of non-peptide libraries that are useful in the present invention is great. For example, Ecker and Crooke, 1995, Bio/Technology 13:351-360 list benzodiazepines, hydantoins, piperazinediones, biphenyls, sugar analogs, beta-mercaptoketones, arylacetic acids, acylpiperidines, benzopyrans, cubanes, xanthines, aminimides, and oxazolones as among the chemical species that form the basis of various libraries.

[0810] Non-peptide libraries can be classified broadly into two types: decorated monomers and oligomers. Decorated monomer libraries employ a relatively simple scaffold structure upon which a variety functional groups is added. Often the scaffold will be a molecule with a known useful pharmacological activity. For example, the scaffold might be the benzodiazepine structure.

[0811] Non-peptide oligomer libraries utilize a large number of monomers that are assembled together in ways that create new shapes that depend on the order of the monomers. Among the monomer units that have been used are carbamates, pyrrolinones, and morpholinos. Peptoids, peptide-like oligomers in which the side chain is attached to the alpha amino group rather than the alpha carbon, form the basis of another version of non-peptide oligomer libraries. The first non-peptide oligomer libraries utilized a single type of monomer and thus contained a repeating backbone. Recent libraries have utilized more than one monomer, giving the libraries added flexibility.

[0812] Screening the libraries can be accomplished by any of a variety of commonly known methods. See, e.g., the following references, which disclose screening of peptide libraries: Parmley and Smith, 1989, Adv. Exp. Med. Biol. 251:215-218; Scott and Smith, 1990, Science 249:386-390; Fowlkes et al., 1992; BioTechniques 13:422-427; Oldenburg et al., 1992, Proc. Natl. Acad. Sci. USA 89:5393-5397; Yu- et al., 1994, Cell 76:933-945; Staudt et al., 1988, Science 241:577-580; Bock et al., 1992, Nature 355:564-566; Tuerk et al., 1992, Proc. Natl. Acad. Sci. USA 89:6988-6992; Ellington et al., 1992, Nature 355:850-852; U.S. Pat. No. 5,096,815, U.S. Pat. No. 5,223,409, and U.S. Pat. No. 5,198,346, all to Ladner et al.; Rebar and Pabo, 1993, Science 263:671-673; and CT Publication No. WO 94/18318.

[0813] In a specific embodiment, screening to identify a molecule that binds. polypeptides of the invention can be carried out by contacting the library members with polypeptides of the invention immobilized on a solid phase and harvesting those library members that bind to the polypeptides of the invention. Examples of such screening methods, termed “panning” techniques are described by way of example in Parmley and Smith, 1988, Gene 73:305-318; Fowlkes et al., 1992, BioTechniques 13:422-427; PCT Publication No. WO 94/18318; and in references cited herein.

[0814] In another embodiment, the two-hybrid system for selecting interacting proteins in yeast (Fields and Song, 1989, Nature 340:245-246; Chien et al., 1991, Proc. Natl. Acad. Sci. USA 88:9578-9582) can be used to identify molecules that specifically bind to polypeptides of the invention.

[0815] Where the binding molecule is a polypeptide, the polypeptide can be conveniently selected from any peptide library, including random peptide libraries, combinatorial peptide libraries, or biased peptide libraries. The term “biased” is used herein to mean that the method of generating the library is manipulated so as to restrict one or more parameters that govern the diversity of the resulting collection of molecules, in this case peptides.

[0816] Thus, a truly random peptide library would generate a collection of peptides in which the probability of finding a particular amino acid at a given position of the peptide is the same for all 20 amino acids. A bias can be introduced into the library, however, by specifying, for example, that a lysine occur every fifth amino acid or that positions 4, 8, and 9 of a decapeptide library be fixed to include only arginine. Clearly, many types of biases can be contemplated, and the present invention is not restricted to any particular bias. Furthermore, the present invention contemplates specific types of peptide libraries, such as phage displayed peptide libraries and those that utilize a DNA construct comprising a lambda phage vector with a DNA insert.

[0817] As mentioned above, in the case of a binding molecule that is a polypeptide, the polypeptide may have about 6 to less than about 60 amino acid residues, preferably about 6 to about 10 amino acid residues, and most preferably, about 6 to about 22 amino acids. In another embodiment, a binding polypeptide has in the range of 15-100 amino acids, or 20-50 amino acids.

[0818] The selected binding polypeptide can be obtained by chemical synthesis or recombinant expression.

[0819] Other Activities

[0820] A polypeptide, polynucleotide, agonist, or antagonist of the present invention, as a result of the ability to stimulate vascular endothelial cell growth, may be employed in treatment for stimulating re-vascularization of ischemic tissues due to various disease conditions such as thrombosis, arteriosclerosis, and other cardiovascular conditions. The polypeptide, polynucleotide, agonist, or antagonist of the present invention may also be employed to stimulate angiogenesis and limb regeneration, as discussed above.

[0821] A polypeptide, polynucleotide, agonist, or antagonist of the present invention may also be employed for treating wounds due to injuries, burns, post-operative tissue repair, and ulcers since they are mitogenic to various cells of different origins, such as fibroblast cells and skeletal muscle cells, and therefore, facilitate the repair or replacement of damaged or diseased tissue.

[0822] A polypeptide, polynucleotide, agonist, or antagonist of the present invention may also be employed stimulate neuronal growth and to treat and prevent neuronal damage which occurs in certain neuronal disorders or neuro-degenerative conditions such as Alzheimer's disease, Parkinson's disease, and AIDS-related complex. A polypeptide, polynucleotide, agonist, or antagonist of the present invention may have the ability to stimulate chondrocyte growth, therefore, they may be employed to enhance bone and penodontal regeneration and aid in tissue transplants or bone grafts.

[0823] A polypeptide, polynucleotide, agonist, or antagonist of the present invention may be also be employed to prevent skin aging due to sunburn by stimulating keratinocyte growth.

[0824] A polypeptide, polynucleotide, agonist, or antagonist of the present invention may also be employed for preventing hair loss, since FGF family members activate hair-forming cells and promotes melanocyte growth. Along the same lines, a polypeptide, polynucleotide, agonist, or antagonist of the present invention may be employed to stimulate growth and differentiation of hematopoietic cells and bone marrow cells when used in combination with other cytokines.

[0825] A polypeptide, polynucleotide, agonist, or antagonist of the present invention may also be employed to maintain organs before transplantation or for supporting cell culture of primary tissues. A polypeptide, polynucleotide, agonist, or antagonist of the present invention may also be employed for inducing tissue of mesodermal origin to differentiate in early embryos.

[0826] A polypeptide, polynucleotide, agonist, or antagonist of the present invention may also increase or decrease the differentiation or proliferation of embryonic stem cells, besides, as discussed above, hematopoietic lineage.

[0827] A polypeptide, polynucleotide, agonist, or antagonist of the present invention may also be used to modulate mammalian characteristics, such as body height, weight, hair color, eye color, skin, percentage of adipose tissue, pigmentation, size, and shape (e.g., cosmetic surgery). Similarly, a polypeptide, polynucleotide, agonist, or antagonist of the present invention may be used to modulate mammalian metabolism affecting catabolism, anabolism, processing, utilization, and storage of energy.

[0828] A polypeptide, polynucleotide, agonist, or antagonist of the present invention may be used to change a mammal's mental state or physical state by influencing biorhythms, caricadic rhythms, depression (including depressive disorders), tendency for violence, tolerance for pain, reproductive capabilities (preferably by Activin or Inhibin-like activity), hormonal or endocrine levels, appetite, libido, memory, stress, or other cognitive qualities.

[0829] A polypeptide, polynucleotide, agonist, or antagonist of the present invention may also be used as a food additive or preservative, such as to increase or decrease storage capabilities, fat content, lipid, protein, carbohydrate, vitamins, minerals, cofactors or other nutritional components.

[0830] The above-recited applications have uses in a wide variety of hosts. Such hosts include, but are not limited to, human, murine, rabbit, goat, guinea pig, camel, horse, mouse, rat, hamster, pig, micro-pig, chicken, goat, cow, sheep, dog, cat, non-human primate, and human. In specific embodiments, the host is a mouse, rabbit, goat, guinea pig, chicken, rat, hamster, pig, sheep, dog or cat. In preferred embodiments, the host is a mammal. In most preferred embodiments, the host is a human.

[0831] Other Preferred Embodiments

[0832] Other preferred embodiments of the claimed invention include an isolated nucleic acid molecule comprising a nucleotide sequence which is at least 95% identical to a sequence of at least about 50 contiguous nucleotides in the nucleotide sequence of SEQ ID NO:X or the complementary strand thereto, the nucleotide sequence as defined in column 5 of Table 1A or columns 8 and 9 of Table 2 or the complementary strand thereto, and/or cDNA contained in Clone ID NO:Z.

[0833] Also preferred is a nucleic acid molecule wherein said sequence of contiguous nucleotides is included in the nucleotide sequence of the portion of SEQ ID NO:X as defined in column 5, “ORF (From-To)”, in Table 1A.

[0834] Also preferred is a nucleic acid molecule wherein said sequence of contiguous nucleotides is included in the nucleotide sequence of the portion of SEQ ID NO:X as defined in columns 8 and 9, “NT From” and “NT To” respectively, in Table 2.

[0835] Also preferred is an isolated nucleic acid molecule comprising a nucleotide sequence which is at least 95% identical to a sequence of at least about 150 contiguous nucleotides in the nucleotide sequence of SEQ ID NO:X or the complementary strand thereto, the nucleotide sequence as defined in column 5 of Table 1A or columns 8 and 9 of Table 2 or the complementary strand thereto, and/or cDNA contained in Clone ID NO:Z.

[0836] Further preferred is an isolated nucleic acid molecule comprising a nucleotide sequence which is at least 95% identical to a sequence of at least about 500 contiguous nucleotides in the nucleotide sequence of SEQ ID NO:X or the complementary strand thereto, the nucleotide sequence as defined in column 5 of Table 1A or columns 8 and 9 of Table 2 or the complementary strand thereto, and/or cDNA contained in Clone ID NO:Z.

[0837] A further preferred embodiment is a nucleic acid molecule comprising a nucleotide sequence which is at least 95% identical to the nucleotide sequence of the portion of SEQ ID NO:X defined in column 5, “ORF (From-To)”, in Table 1A.

[0838] A further preferred embodiment is a nucleic acid molecule comprising a nucleotide sequence which is at least 95% identical to the nucleotide sequence of the portion of SEQ ID NO:X defined in columns 8 and 9, “NT From” and “NT To”, respectively, in Table 2.

[0839] A further preferred embodiment is an isolated nucleic acid molecule comprising a nucleotide sequence which is at least 95% identical to the complete nucleotide sequence of SEQ ID NO:X or the complementary strand thereto, the nucleotide sequence as defined in column 5 of Table 1A or columns 8 and 9 of Table 2 or the complementary strand thereto, and/or cDNA contained in Clone ID NO:Z.

[0840] Also preferred is an isolated nucleic acid molecule which hybridizes under stringent hybridization conditions to a nucleic acid molecule comprising a nucleotide sequence of SEQ ID NO:X or the complementary strand thereto, the nucleotide sequence as defined in column 5 of Table 1A or columns 8 and 9 of Table 2 or the complementary strand thereto, and/or cDNA contained in Clone ID NO:Z, wherein said nucleic acid molecule which hybridizes does not hybridize under stringent hybridization conditions to a nucleic acid molecule having a nucleotide sequence consisting of only A residues or of only T residues.

[0841] Also preferred is a composition of matter comprising a DNA molecule which comprises the cDNA contained in Clone ID NO:Z.

[0842] Also preferred is an isolated nucleic acid molecule comprising a nucleotide sequence which is at least 95% identical to a sequence of at least 50 contiguous nucleotides of the cDNA sequence contained in Clone ID NO:Z.

[0843] Also preferred is an isolated nucleic acid molecule, wherein said sequence of at least 50 contiguous nucleotides is included in the nucleotide sequence of an open reading frame sequence encoded by cDNA contained in Clone ID NO:Z.

[0844] Also preferred is an isolated nucleic acid molecule comprising a nucleotide sequence which is at least 95% identical to sequence of at least 150 contiguous nucleotides in the nucleotide sequence encoded by cDNA contained in Clone ID NO:Z.

[0845] A further preferred embodiment is an isolated nucleic acid molecule comprising a nucleotide sequence which is at least 95% identical to sequence of at least 500 contiguous nucleotides in the nucleotide sequence encoded by cDNA contained in Clone ID NO:Z.

[0846] A further preferred embodiment is an isolated nucleic acid molecule comprising a nucleotide sequence which is at least 95% identical to the complete nucleotide sequence encoded by cDNA contained in Clone ID NO:Z.

[0847] A further preferred embodiment is a method for detecting in a biological sample a nucleic acid molecule comprising a nucleotide sequence which is at least 95% identical to a sequence of at least 50 contiguous nucleotides in a sequence selected from the group consisting of: a nucleotide sequence of SEQ ID NO:X or the complementary strand thereto; the nucleotide sequence as defined in column 5 of Table 1A or columns 8 and 9 of Table 2 or the complementary strand thereto; and a nucleotide sequence encoded by cDNA contained in Clone ID NO:Z; which method comprises a step of comparing a nucleotide sequence of at least one nucleic acid molecule in said sample with a sequence selected from said group and determining whether the sequence of said nucleic acid molecule in said sample is at least 95% identical to said selected sequence.

[0848] Also preferred is the above method wherein said step of comparing sequences comprises determining the extent of nucleic acid hybridization between nucleic acid molecules in said sample and a nucleic acid molecule comprising said sequence selected from said group. Similarly, also preferred is the above method wherein said step of comparing sequences is performed by comparing the nucleotide sequence determined from a nucleic acid molecule in said sample with said sequence selected from said group. The nucleic acid molecules can comprise DNA molecules or RNA molecules.

[0849] A further preferred embodiment is a method for identifying the species, tissue or cell type of a biological sample which method comprises a step of detecting nucleic acid molecules in said sample, if any, comprising a nucleotide sequence that is at least 95% identical to a sequence of at least 50 contiguous nucleotides in a sequence selected from the group consisting of: a nucleotide sequence of SEQ ID NO:X or the complementary strand thereto; the nucleotide sequence as defined in column 5 of Table 1A or columns 8 and 9 of Table 2 or the complementary strand thereto; and a nucleotide sequence of the cDNA contained in Clone ID NO:Z.

[0850] The method for identifying the species, tissue or cell type of a biological sample can comprise a step of detecting nucleic acid molecules comprising a nucleotide sequence in a panel of at least two nucleotide sequences, wherein at least one sequence in said panel is at least 95% identical to a sequence of at least 50 contiguous nucleotides in a sequence selected from said group.

[0851] Also preferred is a method for diagnosing in a subject a pathological condition associated with abnormal structure or expression of a nucleotide sequence of SEQ ID NO:X or the complementary strand thereto; the nucleotide sequence as defined in column 5 of Table 1A or columns 8 and 9 of Table 2 or the complementary strand thereto; or the cDNA contained in Clone ID NO:Z which encodes a protein, wherein the method comprises a step of detecting in a biological sample obtained from said subject nucleic acid molecules, if any, comprising a nucleotide sequence that is at least 95% identical to a sequence of at least 50 contiguous nucleotides in a sequence selected from the group consisting of: a nucleotide sequence of SEQ ID NO:X or the complementary strand thereto; the nucleotide sequence as defined in column 5 of Table 1A or columns 8 and 9 of Table 2 or the complementary strand thereto; and a nucleotide sequence of cDNA contained in Clone ID NO:Z.

[0852] The method for-diagnosing a pathological condition can comprise a step of detecting nucleic acid molecules comprising a nucleotide sequence in a panel of at least two nucleotide sequences, wherein at least one sequence in said panel is at least 95% identical to a sequence of at least 50 contiguous nucleotides in a sequence selected from said group.

[0853] Also preferred is a composition of matter comprising isolated nucleic acid molecules wherein the nucleotide sequences of said nucleic acid molecules comprise a panel of at least two nucleotide sequences, wherein at least one sequence in said panel is at least 95% identical to a sequence of at least 50 contiguous nucleotides in a sequence selected from the group consisting of: a nucleotide sequence of SEQ ID NO:X or the complementary strand thereto; the nucleotide sequence as defined in column 5 of Table 1A or columns 8 and 9 of Table 2 or the complementary strand thereto; and a nucleotide sequence encoded by cDNA contained in Clone ID NO:Z. The nucleic acid molecules can comprise DNA molecules or RNA molecules.

[0854] Also preferred is a composition of matter comprising isolated nucleic acid molecules wherein the nucleotide sequences of said nucleic acid molecules comprise a DNA microarray or “chip” of at least 1, 2, 3, 4, 5, 6, 7, 8, 9, 10, 15, 20, 25, 30, 40, 50, 100, 150, 200, 250, 300, 500, 1000, 2000, 3000, or 4000 nucleotide sequences, wherein at least one sequence in said DNA microarray or “chip” is at least 95% identical to a sequence of at least 50 contiguous nucleotides in a sequence selected from the group consisting of: a nucleotide sequence of SEQ ID NO:X wherein X is any integer as defined in Table 1A; and a nucleotide sequence encoded by a human cDNA clone identified by a cDNA “Clone ID” in Table 1A.

[0855] Also preferred is an isolated polypeptide comprising an amino acid sequence at least 90% identical to a sequence of at least about 10 contiguous amino acids in the polypeptide sequence of SEQ ID NO:Y; a polypeptide encoded by SEQ ID NO:X or the complementary strand thereto; the polypeptide encoded by the nucleotide sequence as defined in columns 8 and 9 of Table 2; and/or a polypeptide encoded by cDNA contained in Clone ID NO:Z.

[0856] Also preferred is an isolated polypeptide comprising an amino acid sequence at least 95% identical to a sequence of at least about 30 contiguous amino acids in the amino acid sequence of SEQ ID NO:Y; a polypeptide encoded by SEQ ID NO:X or the complementary strand thereto; the polypeptide encoded by the nucleotide sequence as defined in columns 8 and 9 of Table 2; and/or a polypeptide encoded by cDNA contained in Clone ID NO:Z.

[0857] Further preferred is an isolated polypeptide comprising an amino acid sequence at least 95% identical to a sequence of at least about 100 contiguous amino acids in the amino acid sequence of SEQ ID NO:Y; a polypeptide encoded by SEQ ID NO:X or the complementary strand thereto; the polypeptide encoded by the nucleotide sequence as defined in columns 8 and 9 of Table 2; and/or a polypeptide encoded by cDNA contained in Clone ID NO:Z.

[0858] Further preferred is an isolated polypeptide comprising an amino acid sequence at least 95% identical to the complete amino acid sequence of SEQ ID NO:Y; a polypeptide encoded by SEQ ID NO:X or the complementary strand thereto; the polypeptide encoded by the nucleotide sequence as defined in columns 8 and 9 of Table 2; and/or a polypeptide encoded by cDNA contained in Clone ID NO:Z.

[0859] Further preferred is an isolated polypeptide comprising an amino acid sequence at least 90% identical to a sequence of at least about 10 contiguous amino acids in the complete amino acid sequence of a polypeptide encoded by contained in Clone ID NO:Z

[0860] Also preferred is a polypeptide wherein said sequence of contiguous amino acids is included in the amino acid sequence of a portion of said polypeptide encoded by cDNA contained in Clone ID NO:Z; a polypeptide encoded by SEQ ID NO:X or the complementary strand thereto; the polypeptide encoded by the nucleotide sequence as defined in columns 8 and 9 of Table 2; and/or the polypeptide sequence of SEQ ID NO:Y.

[0861] Also preferred is an isolated polypeptide comprising an amino acid sequence at least 95% identical to a sequence of at least about 30 contiguous amino acids in the amino acid sequence of a polypeptide encoded by the cDNA contained in Clone ID NO:Z.

[0862] Also preferred is an isolated polypeptide comprising an amino acid sequence at least 95% identical to a sequence of at least about 100 contiguous amino acids in the amino acid sequence of a polypeptide encoded by cDNA contained in Clone ID NO:Z.

[0863] Also preferred is an isolated polypeptide comprising an amino acid sequence at least 95% identical to the amino acid sequence of a polypeptide encoded by the cDNA contained in Clone ID NO:Z.

[0864] Further preferred is an isolated antibody which binds specifically to a polypeptide comprising an amino acid sequence that is at least 90% identical to a sequence of at least 10 contiguous amino acids in a sequence selected from the group consisting of: a polypeptide sequence of SEQ ID NO:Y; a polypeptide encoded by SEQ ID NO:X or the complementary strand thereto; the polypeptide encoded by the nucleotide sequence as defined in columns 8 and 9 of Table 2; and a polypeptide encoded by the cDNA contained in Clone ID NO:Z.

[0865] Further preferred is a method for detecting in a biological sample a polypeptide comprising an amino acid sequence which is at least 90% identical to a sequence of at least 10 contiguous amino acids in a sequence selected from the group consisting of: a polypeptide sequence of SEQ ID NO:Y; a polypeptide encoded by SEQ ID NO:X or the complementary strand thereto; the polypeptide encoded by the nucleotide sequence as defined in columns 8 and 9 of Table 2; and a polypeptide encoded by the cDNA contained in Clone ID NO:Z; which method comprises a step of comparing an amino acid sequence of at least one polypeptide molecule in said sample with a sequence selected from said group and determining whether the sequence of said polypeptide molecule in said sample is at least 90% identical to said sequence of at least 10 contiguous amino acids.

[0866] Also preferred is the above method wherein said step of comparing an amino acid sequence of at least one polypeptide molecule in said sample with a sequence selected from said group comprises determining the extent of specific binding of polypeptides in said sample to an antibody which binds specifically to a polypeptide comprising an amino acid sequence that is at least 90% identical to a sequence of at least 10 contiguous amino acids in a sequence selected from the group consisting of: a polypeptide sequence of SEQ ID NO:Y; a polypeptide encoded by SEQ ID NO:X or the complementary strand thereto; the polypeptide encoded by the nucleotide sequence as defined in columns 8 and 9 of Table 2; and a polypeptide encoded by the cDNA contained in Clone ID NO:Z.

[0867] Also preferred is the above method wherein said step of comparing sequences is performed by comparing the amino acid sequence determined from a polypeptide molecule in said sample with said sequence selected from said group.

[0868] Also preferred is a method for identifying the species, tissue or cell type of a biological sample which method comprises a step of detecting polypeptide molecules in said sample, if any, comprising an amino acid sequence that is at least 90% identical to a sequence of at least 10 contiguous amino acids in a sequence selected from the group consisting of: polypeptide sequence of SEQ ID NO:Y; a polypeptide encoded by SEQ ID NO:X or the complementary strand thereto; the polypeptide encoded by the nucleotide sequence as defined in columns 8 and 9 of Table 2; and a polypeptide encoded by the cDNA contained in Clone ID NO:Z.

[0869] Also preferred is the above method for identifying the species, tissue or cell type of a biological sample, which method comprises a step of detecting polypeptide molecules comprising an amino acid sequence in a panel of at least two amino acid sequences, wherein at least one sequence in said panel is at least 90% identical to a sequence of at least 10 contiguous amino acids in a sequence selected from the above group.

[0870] Also preferred is a method for diagnosing in a subject a pathological condition associated with abnormal structure or expression of a nucleic acid sequence identified in Table 1A or Table 2 encoding a polypeptide, which method comprises a step of detecting in a biological sample obtained from said subject polypeptide molecules comprising an amino acid sequence in a panel of at least two amino acid sequences, wherein at least one sequence in said panel is at least 90% identical to a sequence of at least 10 contiguous amino acids in a sequence selected from the group consisting of: polypeptide sequence of SEQ ID NO:Y; a polypeptide encoded by SEQ ID NO:X or the complementary strand thereto; the polypeptide encoded by the nucleotide sequence as defined in columns 8 and 9 of Table 2; and a polypeptide encoded by the cDNA contained in Clone ID NO:Z.

[0871] In any of these methods, the step of detecting said polypeptide molecules includes using an antibody.

[0872] Also preferred is an isolated nucleic acid molecule comprising a nucleotide sequence which is at least 95% identical to a nucleotide sequence encoding a polypeptide wherein said polypeptide comprises an amino acid sequence that is at least 90% identical to a sequence of at least 10 contiguous amino acids in a sequence selected from the group consisting of: polypeptide sequence of SEQ ID NO:Y; a polypeptide encoded by SEQ ID NO:X or the complementary strand thereto; the polypeptide encoded by the nucleotide sequence as defined in columns 8 and 9 of Table 2; and a polypeptide encoded by the cDNA contained in Clone ID NO:Z.

[0873] Also preferred is an isolated nucleic acid molecule, wherein said nucleotide sequence encoding a polypeptide has been optimized for expression of said polypeptide in a prokaryotic host.

[0874] Also preferred is a polypeptide molecule, wherein said polypeptide comprises an amino acid sequence selected from the group consisting of: polypeptide sequence of SEQ ID NO:Y; a polypeptide encoded by SEQ ID NO:X or the complementary strand thereto; the polypeptide encoded by the nucleotide sequence as defined in columns 8 and 9 of Table 2; and a polypeptide encoded by the cDNA contained in Clone ID NO:Z.

[0875] Further preferred is a method of making a recombinant vector comprising inserting any of the above isolated nucleic acid molecule into a vector. Also preferred is the recombinant vector produced by this method. Also preferred is a method of making a recombinant host cell comprising introducing the vector into a host cell, as well as the recombinant host cell produced by this method.

[0876] Also preferred is a method of making an isolated polypeptide comprising culturing this recombinant host cell under conditions such that said polypeptide is expressed and recovering said polypeptide. Also preferred is this method of making an isolated polypeptide, wherein said recombinant host cell is a eukaryotic cell and said polypeptide is a human protein comprising an amino acid sequence selected from the group consisting of: polypeptide sequence of SEQ ID NO:Y; a polypeptide encoded by SEQ ID NO:X or the complementary strand thereto; the polypeptide encoded by the nucleotide sequence as defined in columns 8 and 9 of Table 2; and a polypeptide encoded by the cDNA contained in Clone ID NO:Z. The isolated polypeptide produced by this method is also preferred.

[0877] Also preferred is a method of treatment of an individual in need of an increased level of a protein activity, which method comprises administering to such an individual a Therapeutic comprising an amount of an isolated polypeptide, polynucleotide, immunogenic fragment or analogue thereof, binding agent, antibody, or antigen binding fragment of the claimed invention effective to increase the level of said protein activity in said individual.

[0878] Also preferred is a method of treatment of an individual in need of a decreased level of a protein activity, which method comprised administering to such an individual a Therapeutic comprising an amount of an isolated polypeptide, polynucleotide, immunogenic fragment or analogue thereof, binding agent, antibody, or antigen binding fragment of the claimed invention effective to decrease the level of said protein activity in said individual.

[0879] Also preferred is a method of treatment of an individual in need of a specific delivery of toxic compositions to diseased cells (e.g., tumors, leukemias or lymphomas), which method comprises administering to such an individual a Therapeutic comprising an amount of an isolated polypeptide of the invention, including, but not limited to a binding agent, or antibody of the claimed invention that are associated with toxin or cytotoxic prodrugs.

[0880] Having generally described the invention, the same will be more readily understood by reference to the following examples, which are provided by way of illustration and are not intended as limiting.

TABLE 6

| ATCC Deposits | Deposit Date | ATCC Designation Number |
|---|---|---|
| LP01, LP02, LP03, | May-20-97 | 209059, 209060, 209061, 209062, |
| LP04, LP05, LP06, | | 209063, 209064, 209065, 209066, |
| LP07, LP08, LP09, | | 209067, 209068, 209069 |
| LP10, LP11, | | |
| LP12 | Jan-12-98 | 209579 |
| LP13 | Jan-12-98 | 209578 |
| LP14 | Jul-16-98 | 203067 |
| LP15 | Jul-16-98 | 203068 |
| LP16 | Feb-1-99 | 203609 |
| LP17 | Feb-1-99 | 203610 |
| LP20 | Nov-17-98 | 203485 |
| LP21 | Jun-18-99 | PTA-252 |
| LP22 | Jun-18-99 | PTA-253 |
| LP23 | Dec-22-99 | PTA-1081 |

### EXAMPLES

### Example 1

### Isolation of a Selected cDNA Clone from the Deposited Sample

[0881] Each Clone ID NO:Z is contained in a plasmid vector. Table 7 identifies the vectors used to construct the cDNA library from which each clone was isolated. In many cases, the vector used to construct the library is a phage vector from which a plasmid has been excised. The following correlates the related plasmid for each phage vector used in constructing the cDNA library. For example, where a particular clone is identified in Table 7 as being isolated in the vector “Lambda Zap,” the corresponding deposited clone is in “pBluescript.”

| Vector Used to Construct Library | Corresponding Deposited Plasmid |
|---|---|
| Lambda Zap | pBluescript (pBS) |
| Uni-Zap XR | pBluescript (pBS) |
| Zap Express | pBK |
| lafmid BA | plafmid BA |
| pSport1 | pSport1 |
| pCMVSport 2.0 | pCMVSport 2.0 |
| pCMVSport 3.0 | pCMVSport 3.0 |
| pCR ®2.1 | pCR ®2.1 |

[0882] Vectors Lambda Zap (U.S. Pat. Nos. 5,128,256 and 5,286,636), Uni-Zap XR (U.S. Pat. Nos. 5,128, 256 and 5,286,636), Zap Express (U.S. Pat. Nos. 5,128,256 and 5,286,636), pBluescript (pBS) (Short, J. M. et al., Nucleic Acids Res. 16:7583-7600 (1988); Alting-Mees, M. A. and Short, J. M., Nucleic Acids Res. 17:9494 (1989)) and pBK (Alting-Mees, M. A. et al., Strategies 5:58-61 (1992)) are commercially available from Stratagene Cloning Systems, Inc., 11011 N. Torrey Pines Road, La Jolla, Calif., 92037. pBS contains an ampicillin resistance gene and pBK contains a neomycin resistance gene. Both can be transformed into E. coli strain XL-1 Blue, also available from Stratagene. pBS comes in 4 forms SK+, SK−, KS+and KS. The S and K refers to the orientation of the polylinker to the T7 and T3 primer sequences which flank the polylinker region (“S” is for SacI and “K” is for KpnI which are the first sites on each respective end of the linker). “+” or “−” refer to the orientation of the fl origin of replication (“ori”), such that in one orientation, single stranded rescue initiated from the fl ori generates sense strand DNA and in the other, antisense.

[0883] Vectors pSport1, pCMVSport 2.0 and pCMVSport 3.0, were obtained from Life Technologies, Inc., P.O. Box 6009, Gaithersburg, Md. 20897. All Sport vectors contain an ampicillin resistance gene and may be transformed into E. coli strain DH1OB, also available from Life Technologies. (See, for instance, Gruber, C. E., et al., Focus 15:59 (1993)). Vector lafmid BA (Bento Soares, Columbia University, NY) contains an ampicillin resistance gene and can be transformed into E. coli strain XL-1 Blue. Vector pCR®2.1, which is available from Invitrogen, 1600 Faraday Avenue, Carlsbad, Calif. 92008, contains an ampicillin resistance gene and may be transformed into E. coli strain DH1OB, available from Life Technologies. (See, for instance, Clark, J. M., Nuc. Acids Res. 16:9677-9686 (1988) and Mead, D. et al., Bio/Technology 9: (1991)). Preferably, a polynucleotide of the present invention does not comprise the phage vector sequences identified for the particular clone in Table 7, as well as the corresponding plasmid vector sequences designated above.

[0884] The deposited material in the sample assigned the ATCC Deposit Number cited by reference to Tables 1, 2, 6 and 7 for any given cDNA clone also may contain one or more additional plasmids, each comprising a cDNA clone different from that given clone. Thus, deposits sharing the same ATCC Deposit Number contain at least a plasmid for each Clone ID NO:Z.

TABLE 7

| | | | ATCC |
|---|---|---|---|
| Libraries owned by Catalog | Catalog Description | Vector | Deposit |
| HUKA HUKB HUKC HUKD HUKE | Human Uterine Cancer | Lambda ZAP II | LP01 |
| HUKF HUKG | | | |
| HCNA HCNB | Human Colon | Lambda Zap II | LP01 |
| HFFA | Human Fetal Brain, random primed | Lambda Zap II | LP01 |
| HTWA | Resting T-Cell | Lambda ZAP II | LP01 |
| HBQA | Early Stage Human Brain, random | Lambda ZAP II | LP01 |
| | primed | | |
| HLMB HLMF HLMG HLMH HLMI | breast lymph node CDNA library | Lambda ZAP II | LP01 |
| HLMJ HLMM HLMN | | | |
| HCQA HCQB | human colon cancer | Lambda ZAP II | LP01 |
| HMEA HMEC HMED HMEE HMEF | Human Microvascular Endothelial | Lambda ZAP II | LP01 |
| HMEG HMEI HMEJ HMEK HMEL | Cells, fract. A | | |
| HUSA HUSC | Human Umbilical Vein Endothelial | Lambda ZAP II | LP01 |
| | Cells, fract. A | | |
| HLQA HLQB | Hepatocellular Tumor | Lambda ZAP II | LP01 |
| HHGA HHGB HHGC HHGD | Hemangiopericytoma | Lambda ZAP II | LP01 |
| HSDM | Human Striatum Depression, re- | Lambda ZAP II | LP01 |
| | rescue | | |
| HUSH | H Umbilical Vein Endothelial Cells, | Lambda ZAP II | LP01 |
| | frac A, re-excision | | |
| HSGS | Salivary gland, subtracted | Lambda ZAP II | LP01 |
| HFXA HFXB HFXC HFXD HFXE | Brain frontal cortex | Lambda ZAP II | LP01 |
| HFXF HFXG HFXH | | | |
| HPQA HPQB HPQC | PERM TF274 | Lambda ZAP II | LP01 |
| HFXJ HFXK | Brain Frontal Cortex, re-excision | Lambda ZAP II | LP01 |
| HCWA HCWB HCWC HCWD HCWE | CD34 positive cells (Cord Blood) | ZAP Express | LP02 |
| HCWF HCWG HCWH HCWI HCWJ | | | |
| HCWK | | | |
| HCUA HCUB HCUC | CD34 depleted Buffy Coat (Cord | ZAP Express | LP02 |
| | Blood) | | |
| HRSM | A-14 cell line | ZAP Express | LP02 |
| HRSA | A1-CELL LINE | ZAP Express | LP02 |
| HCUD HCUE HCUF HCUG HCUH | CD34 depleted Buffy Coat (Cord | ZAP Express | LP02 |
| HCUI | Blood), re-excision | | |
| HBXE HBXF HBXG | H. Whole Brain #2, re-excision | ZAP Express | LP02 |
| HRLM | L8 cell line | ZAP Express | LP02 |
| HBXA HBXB HBXC HBXD | Human Whole Brain #2 - Oligo dT > | ZAP Express | LP02 |
| | 1.5 Kb | | |
| HUDA HUDB HUDC | Testes | ZAP Express | LP02 |
| HHTM HHTN HHTO | H. hypothalamus, frac A; re-excision | ZAP Express | LP02 |
| HHTL | H. hypothalamus, frac A | ZAP Express | LP02 |
| HASA HASD | Human Adult Spleen | Uni-ZAP XR | LP03 |
| HFKC HFKD HFKE HFKF HFKG | Human Fetal Kidney | Uni-ZAP XR | LP03 |
| HE8A HE8B HE8C HE8D HE8E HE8F | Human 8 Week Whole Embryo | Uni-ZAP XR | LP03 |
| HE8M HE8N | | | |
| HGBA HGBD HGBE HGBF HGBG | Human Gall Bladder | Uni-ZAP XR | LP03 |
| HGBH HGBI | | | |
| HLHA HLHB HLHC HLHD HLHE | Human Fetal Lung III | Uni-ZAP XR | LP03 |
| HLHF HLHG HLHH HLHQ | | | |
| HPMA HPMB HPMC HPMD HPME | Human Placenta | Uni-ZAP XR | LP03 |
| HPMF HPMG HPMH | | | |
| HPRA HPRB HPRC HPRD | Human Prostate | Uni-ZAP XR | LP03 |
| HSIA HSIC HSID HSIE | Human Adult Small Intestine | Uni-ZAP XR | LP03 |
| HTEA HTEB HTEC HTED HTEE | Human Testes | Uni-ZAP XR | LP03 |
| HTEF HTEG HTEH HTEI HTEJ HTEK | | | |
| HTPA HTPB HTPC HTPD HTPE | Human Pancreas Tumor | Uni-ZAP XR | LP03 |
| HTTA HTTB HTTC HTTD HTTE | Human Testes Tumor | Uni-ZAP XR | LP03 |
| HTTF | | | |
| HAPA HAPB HAPC HAPM | Human Adult Pulmonary | Uni-ZAP XR | LP03 |
| HETA HETB HETC HETD HETE | Human Endometrial Tumor | Uni-ZAP XR | LP03 |
| HETF HETG HETH HETI | | | |
| HHFB HHFC HHFD HHFE HHFF | Human Fetal Heart | Uni-ZAP XR | LP03 |
| HHFG HHFH HHFI | | | |
| HHPB HHPC HHPD HHPE HHPF | Human Hippocampus | Uni-ZAP XR | LP03 |
| HHPG HHPH | | | |
| HCE1 HCE2 HCE3 HCE4 HCE5 HCE6 | Human Cerebellum | Uni-ZAP XR | LP03 |
| HCEC HCED HCEE HCEF HCEG | | | |
| HUVB HUVC HUVD HUVE | Human Umbilical Vein, Endo. | Uni-ZAP XR | LP03 |
| | remake | | |
| HSTA HSTB HSTC HSTD | Human Skin Tumor | Uni-ZAP XR | LP03 |
| HTAA HTAB HTAC HTAD HTAE | Human Activated T-Cells | Uni-ZAP XR | LP03 |
| HFEA HFEB HFEC | Human Fetal Epithelium (Skin) | Uni-ZAP XR | LP03 |
| HJPA HJPB HJPC HJPD | HUMAN JURKAT MEMBRANE | Uni-ZAP XR | LP03 |
| | BOUND POLYSOMES | | |
| HESA | Human epithelioid sarcoma | Uni-Zap XR | LP03 |
| HLTA HLTB HLTC HLTD HLTE | Human T-Cell Lymphoma | Uni-ZAP XR | LP03 |
| HLTF | | | |
| HFTA HFTB HFTC HFTD | Human Fetal Dura Mater | Uni-ZAP XR | LP03 |
| HRDA HRDB HRDC HRDD HRDE | Human Rhabdomyosarcoma | Uni-ZAP XR | LP03 |
| HRDF | | | |
| HCAA HCAB HCAC | Cem cells cyclohexamide treated | Uni-ZAP XR | LP03 |
| HRGA HRGB HRGC HRGD | Raji Cells, cyclohexamide treated | Uni-ZAP XR | LP03 |
| HSUA HSUB HSUC HSUM | Supt Cells, cyclohexamide treated | Uni-ZAP XR | LP03 |
| HT4A HT4C HT4D | Activated T-Cells, 12 hrs. | Uni-ZAP XR | LP03 |
| HE9A HE9B HE9C HE9D HE9E HE9F | Nine Week Old Early Stage Human | Uni-ZAP XR | LP03 |
| HE9G HE9H HE9M HE9N | | | |
| HATA HATB HATC HATD HATE | Human Adrenal Gland Tumor | Uni-ZAP XR | LP03 |
| HT5A | Activated T-Cells, 24 hrs. | Uni-ZAP XR | LP03 |
| HFGA HFGM | Human Fetal Brain | Uni-ZAP XR | LP03 |
| HNEA HNEB HNEC HNED HNEE | Human Neutrophil | Uni-ZAP XR | LP03 |
| HBGB HBGD | Human Primary Breast Cancer | Uni-ZAP XR | LP03 |
| HBNA HBNB | Human Normal Breast | Uni-ZAP XR | LP03 |
| HCAS | Cem Cells, cyclohexamide treated, | Uni-ZAP XR | LP03 |
| | subtra | | |
| HHPS | Human Hippocampus, subtracted | pBS | LP03 |
| HKCS HKCU | Human Colon Cancer, subtracted | pBS | LP03 |
| HRGS | Raji cells, cyclohexamide treated, | pBS | LP03 |
| | subtracted | | |
| HSUT | Supt cells, cyclohexamide treated, | pBS | LP03 |
| | differentially expressed | | |
| HT4S | Activated T-Cells, 12 hrs, subtracted | Uni-ZAP XR | LP03 |
| HCDA HCDB HCDC HCDD HCDE | Human Chondrosarcoma | Uni-ZAP XR | LP03 |
| HOAA HOAB HOAC | Human Osteosarcoma | Uni-ZAP XR | LP03 |
| HTLA HTLB HTLC HTLD HTLE | Human adult testis, large inserts | Uni-ZAP XR | LP03 |
| HTLF | | | |
| HLMA HLMC HLMD | Breast Lymph node cDNA library | Uni-ZAP XR | LP03 |
| H6EA H6EB H6EC | HL-60, PMA 4H | Uni-ZAP XR | LP03 |
| HTXA HTXB HTXC HTXD HTXE | Activated T-Cell (12 hs)/Thiouridine | Uni-ZAP XR | LP03 |
| HTXF HTXG HTXH | labelledEco | | |
| HNFA HNFB HNFC HNFD HNFE | Human Neutrophil, Activated | Uni-ZAP XR | LP03 |
| HNFF HNFG HNFH HNFJ | | | |
| HTOB HTOC | HUMAN TONSILS, FRACTION 2 | Uni-ZAP XR | LP03 |
| HMGB | Human OB MG63 control fraction I | Uni-ZAP XR | LP03 |
| HOPB | Human OB HOS control fraction I | Uni-ZAP XR | LP03 |
| HORB | Human OB HOS treated (10 nM E2) | Uni-ZAP XR | LP03 |
| | fraction I | | |
| HSVA HSVB HSVC | Human Chronic Synovitis | Uni-ZAP XR | LP03 |
| HROA | HUMAN STOMACH | Uni-ZAP XR | LP03 |
| HBJA HBJB HBJC HBJD HBJE HBJF | HUMAN B CELL LYMPHOMA | Uni-ZAP XR | LP03 |
| HBJG HBJH HBJI HBJJ HBJK | | | |
| HCRA HCRB HCRC | human corpus colosum | Uni-ZAP XR | LP03 |
| HODA HODB HODC HODD | human ovarian cancer | Uni-ZAP XR | LP03 |
| HDSA | Dermatofibrosarcoma Protuberance | Uni-ZAP XR | LP03 |
| HMWA HMWB HMWC HMWD | Bone Marrow Cell Line (RS4; 11) | Uni-ZAP XR | LP03 |
| HMWE HMWF HMWG HMWH | | | |
| HMWI HMWJ | | | |
| HSOA | stomach cancer (human) | Uni-ZAP XR | LP03 |
| HERA | SKIN | Uni-ZAP XR | LP03 |
| HMDA | Brain-medulloblastoma | Uni-ZAP XR | LP03 |
| HGLA HGLB HGLD | Glioblastoma | Uni-ZAP XR | LP03 |
| HEAA | H. Atrophic Endometrium | Uni-ZAP XR | LP03 |
| HBCA HBCB | H. Lymph node breast Cancer | Uni-ZAP XR | LP03 |
| HPWT | Human Prostate BPH, re-excision | Uni-ZAP XR | LP03 |
| HFVG HFVH HFVI | Fetal Liver, subtraction II | pBS | LP03 |
| HNFI | Human Neutrophils, Activated, re- | pBS | LP03 |
| | excision | | |
| HBMB HBMC HBMD | Human Bone Marrow, re-excision | pBS | LP03 |
| HKML HKMM HKMN | H. Kidney Medulla, re-excision | pBS | LP03 |
| HKIX HKIY | H. Kidney Cortex, subtracted | pBS | LP03 |
| HADT | H. Amygdala Depression, subtracted | pBS | LP03 |
| H6AS | Hl-60, untreated, subtracted | Uni-ZAP XR | LP03 |
| H6ES | HL-60, PMA 4H, subtracted | Uni-ZAP XR | LP03 |
| H6BS | HL-60, RA 4h, Subtracted | Uni-ZAP XR | LP03 |
| H6CS | HL-60, PMA 1d, subtracted | Uni-ZAP XR | LP03 |
| HTXJ HTXK | Activated T-cell(12h)/Thiouridine-re- | Uni-ZAP XR | LP03 |
| | excision | | |
| HMSA HMSB HMSC HMSD HMSE | Monocyte activated | Uni-ZAP XR | LP03 |
| HMSF HMSG HMSH HMSI HMSJ | | | |
| HMSK | | | |
| HAGA HAGB HAGC HAGD HAGE | Human Amygdala | Uni-ZAP XR | LP03 |
| HAGF | | | |
| HSRA HSRB HSRE | STROMAL -OSTEOCLASTOMA | Uni-ZAP XR | LP03 |
| HSRD HSRF HSRG HSRH | Human Osteoclastoma Stromal Cells | Uni-ZAP XR | LP03 |
| | -unamplified | | |
| HSQA HSQB HSQC HSQD HSQE | Stromal cell TF274 | Uni-ZAP XR | LP03 |
| HSQF HSQG | | | |
| HSKA HSKB HSKC HSKD HSKE | Smooth muscle, serum treated | Uni-ZAP XR | LP03 |
| HSKF HSKZ | | | |
| HSLA HSLB HSLC HSLD HSLE HSLF | Smooth muscle, control | Uni-ZAP XR | LP03 |
| HSLG | | | |
| HSDA HSDD HSDE HSDF HSDG | Spinal cord | Uni-ZAP XR | LP03 |
| HSDH | | | |
| HPWS | Prostate-BPH subtracted II | pBS | LP03 |
| HSKW HSKX HSKY | Smooth Muscle- HASTE normalized | pBS | LP03 |
| HFPB HFPC HFPD | H. Frontal cortex, epileptic; re-excision | Uni-ZAP XR | LP03 |
| HSDI HSDJ HSDK | Spinal Cord, re-excision | Uni-ZAP XR | LP03 |
| HSKN HSKO | Smooth Muscle Serum Treated, Norm | pBS | LP03 |
| HSKG HSKH HSKI | Smooth muscle, serum induced, re-exc | pBS | LP03 |
| HFCA HFCB HFCC HFCD HFCE | Human Fetal Brain | Uni-ZAP XR | LP04 |
| HFCF | | | |
| HPTA HPTB HPTD | Human Pituitary | Uni-ZAP XR | LP04 |
| HTHB HTHC HTHD | Human Thymus | Uni-ZAP XR | LP04 |
| HE6B HE6C HE6D HE6E HE6F HE6G | Human Whole Six Week Old Embryo | Uni-ZAP XR | LP04 |
| HE6S | | | |
| HSSA HSSB HSSC HSSD HSSE HSSF | Human Synovial Sarcoma | Uni-ZAP XR | LP04 |
| HSSG HSSH HSSI HSSJ HSSK | | | |
| HE7T | 7 Week Old Early Stage Human, | Uni-ZAP XR | LP04 |
| | subtracted | | |
| HEPA HEPB HEPC | Human Epididymus | Uni-ZAP XR | LP04 |
| HSNA HSNB HSNC HSNM HSNN | Human Synovium | Uni-ZAP XR | LP04 |
| HPFB HPFC HPFD HPFE | Human Prostate Cancer, Stage C | Uni-ZAP XR | LP04 |
| | fraction | | |
| HE2A HE2D HE2E HE2H HE2I HE2M | 12 Week Old Early Stage Human | Uni-ZAP XR | LP04 |
| HE2N HE2O | | | |
| HE2B HE2C HE2F HE2G HE2P HE2Q | 12 Week Old Early Stage Human, II | Uni-ZAP XR | LP04 |
| HPTS HPTT HPTU | Human Pituitary, subtracted | Uni-ZAP XR | LP04 |
| HAUA HAUB HAUC | Amniotic Cells-TNF induced | Uni-ZAP XR | LP04 |
| HAQA HAQB HAQC HAQD | Amniotic Cells-Primary Culture | Uni-ZAP XR | LP04 |
| HWTA HWTB HWTC | wilm's tumor | Uni-ZAP XR | LP04 |
| HBSD | Bone Cancer, re-excision | Uni-ZAP XR | LP04 |
| HSGB | Salivary gland, re-excision | Uni-ZAP XR | LP04 |
| HSJA HSJB HSJC | Smooth muscle-ILb induced | Uni-ZAP XR | LP04 |
| HSXA HSXB HSXC HSXD | Human Substantia Nigra | Uni-ZAP XR | LP04 |
| HSHA HSHB HSHC | Smooth muscle, IL1b induced | Uni-ZAP XR | LP04 |
| HOUA HOUB HOUC HOUD HOUE | Adipocytes | Uni-ZAP XR | LP04 |
| HPWA HPWB HPWC HPWD HPWE | Prostate BPH | Uni-ZAP XR | LP04 |
| HELA HELB HELC HELD HELE | Endothelial cells-control | Uni-ZAP XR | LP04 |
| HELF HELG HELH | | | |
| HEMA HEMB HEMC HEMD HEME | Endothelial-induced | Uni-ZAP XR | LP04 |
| HEMF HEMG HEMH | | | |
| HBIA HBIB HBIC | Human Brain, Striatum | Uni-ZAP XR | LP04 |
| HHSA HHSB HHSC HHSD HHSE | Human Hypothalmus, Schizophrenia | Uni-ZAP XR | LP04 |
| HNGA HNGB HNGC HNGD HNGE | neutrophils control | Uni-ZAP XR | LP04 |
| HNGF HNGG HNGH HNGI HNGJ | | | |
| HNHA HNHB HNHC HNHD HNHE | Neutrophils IL-1 and LPS induced | Uni-ZAP XR | LP04 |
| HNHF HNHG HNHH HNHI HNHJ | | | |
| HSDB HSDC | STRIATUM DEPRESSION | Uni-ZAP XR | LP04 |
| HHPT | Hypothalamus | Uni-ZAP XR | LP04 |
| HSAT HSAU HSAV HSAW HSAX | Anergic T-cell | Uni-ZAP XR | LP04 |
| HSAY HSAZ | | | |
| HBMS HBMT HBMU HBMV HBMW | Bone marrow | Uni-ZAP XR | LP04 |
| HBMX | | | |
| HOEA HOEB HOEC HOED HOEE | Osteoblasts | Uni-ZAP XR | LP04 |
| HOEF HOEJ | | | |
| HAIA HAIB HAIC HAID HAIE HAIF | Epithelial-TNFa and INF induced | Uni-ZAP XR | LP04 |
| HTGA HTGB HTGC HTGD | Apoptotic T-cell | Uni-ZAP XR | LP04 |
| HMCA HMCB HMCC HMCD HMCE | Macrophage-oxLDL | Uni-ZAP XR | LP04 |
| HMAA HMAB HMAC HMAD HMAE | Macrophage (GM-CSF treated) | Uni-ZAP XR | LP04 |
| HMAF HMAG | | | |
| HPHA | Normal Prostate | Uni-ZAP XR | LP04 |
| HPIA HPIB HPIC | LNCAP prostate cell line | Uni-ZAP XR | LP04 |
| HPJA HPJB HPJC | PC3 Prostate cell line | Uni-ZAP XR | LP04 |
| HOSE HOSF HOSG | Human Osteoclastoma, re-excision | Uni-ZAP XR | LP04 |
| HTGE HTGF | Apoptotic T-cell, re-excision | Uni-ZAP XR | LP04 |
| HMAJ HMAK | H Macrophage (GM-CSF treated), re- | Uni-ZAP XR | LP04 |
| | excision | | |
| HACB HACC HACD | Human Adipose Tissue, re-excision | Uni-ZAP XR | LP04 |
| HFPA | H. Frontal Cortex, Epileptic | Uni-ZAP XR | LP04 |
| HFAA HFAB HFAC HFAD HFAE | Alzheimer's, spongy change | Uni-ZAP XR | LP04 |
| HFAM | Frontal Lobe, Dementia | Uni-ZAP XR | LP04 |
| HMIA HMIB HMIC | Human Manic Depression Tissue | Uni-ZAP XR | LP04 |
| HTSA HTSE HTSF HTSG HTSH | Human Thymus | pBS | LP05 |
| HPBA HPBB HPBC HPBD HPBE | Human Pineal Gland | pBS | LP05 |
| HSAA HSAB HSAC | HSA 172 Cells | pBS | LP05 |
| HSBA HSBB HSBC HSBM | HSC172 cells | pBS | LP05 |
| HJAA HJAB HJAC HJAD | Jurkat T-cell G1 phase | pBS | LP05 |
| HJBA HJBB HJBC HJBD | Jurkat T-Cell, S phase | PBS | LP05 |
| HAFA HAFB | Aorta endothelial cells + TNF-a | pBS | LP05 |
| HAWA HAWB HAWC | Human White Adipose | pBS | LP05 |
| HTNA HTNB | Human Thyroid | pBS | LP05 |
| HONA | Normal Ovary, Premenopausal | pBS | LP05 |
| HARA HARB | Human Adult Retina | pBS | LP05 |
| HLJA HLJB | Human Lung | pCMvSport 1 | LP06 |
| HOFM HOFN HOFO | H. Ovarian Tumor, II, OV5232 | pCMVSport 2.0 | LP07 |
| HOGA HOGB HOGC | OV 10-3-95 | pCMVSport 2.0 | LP07 |
| HCGL | CD34 + cells, II | pCMVSport 2.0 | LP07 |
| HDLA | Hodgkin's Lymphoma I | pCMVSport 2.0 | LP07 |
| HDTA HDTB HDTC HDTD HDTE | Hodgkin's Lymphoma II | pCMVSport 2.0 | LP07 |
| HKAA HKAB HKAC HKAD HKAE | Keratinocyte | pCMVSport2.0 | LP07 |
| HKAF HKAG HKAH | | | |
| HCIM | CAPFINDER, Crohn's Disease, lib 2 | pCMVSport 2.0 | LP07 |
| HKAL | Keratinocyte, lib 2 | pCMVSport2.0 | LP07 |
| HKAT | Keratinocyte, lib 3 | pCMVSport2.0 | LP07 |
| HNDA | Nasal polyps | pCMVSport2.0 | LP07 |
| HDRA | H. Primary Dendritic Cells, lib 3 | pCMVSport2.0 | LP07 |
| HOHA HOHB HOHC | Human Osteoblasts II | pCMVSport2.0 | LP07 |
| HLDA HLDB HLDC | Liver, Hepatoma | pCMVSport3.0 | LP08 |
| HLDN HLDO HLDP | Human Liver, normal | pCMVSport3.0 | LP08 |
| HMTA | pBMC stimulated w/ poly I/C | pCMVSport3.0 | LP08 |
| HNTA | NTERA2, control | pCMVSport3.0 | LP08 |
| HDPA HDPB HDPC HDPD HDPF | Primary Dendritic Cells, lib 1 | pCMVSport3.0 | LP08 |
| HDPG HDPH HDPI HDPJ HDPK | | | |
| HDPM HDPN HDPO HDPP | Primary Dendritic cells, frac 2 | pCMVSport3.0 | LP08 |
| HMUA HMUB HMUC | Myoloid Progenitor Cell Line | pCMVSport3.0 | LP08 |
| HHEA HHEB HHEC HHED | T Cell helper I | pCMVSport3.0 | LP08 |
| HHEM HHEN HHEO HHEP | T cell helper II | pCMVSport3.0 | LP08 |
| HEQA HEQB HEQC | Human endometrial stromal cells | pCMVSport3.0 | LP08 |
| HJMA HJMB | Human endometrial stromal cells- | pCMVSport3.0 | LP08 |
| | treated with progesterone | | |
| HSWA HSWB HSWC | Human endometrial stromal cells- | pCMVSport3.0 | LP08 |
| | treated with estradiol | | |
| HSYA HSYB HSYC | Human Thymus Stromal Cells | pCMVSport3.0 | LP08 |
| HLWA HLWB HLWC | Human Placenta | pCMVSport3.0 | LP08 |
| HRAA HRAB HRAC | Rejected Kidney, lib 4 | pCMVSport3.0 | LP08 |
| HMTM | PCR, pBMC I/C treated | PCRII | LP09 |
| HMJA | H. Meniingima, M6 | pSport 1 | LP10 |
| HMKA HMKB HMKC HMKD HMKE | H. Meningima, M1 | pSport 1 | LP10 |
| HUSG HUSI | Human umbilical vein endothelial | pSport 1 | LP10 |
| | cells, IL-4 induced | | |
| HUSX HUSY | Human Umbilical Vein Endothelial | pSport 1 | LP10 |
| | Cells, uninduced | | |
| HOFA | Ovarian Tumor I, OV5232 | pSport 1 | LP10 |
| HCFA HCFB HCFC HCFD | T-Cell PHA 16 hrs | pSport 1 | LP10 |
| HCFL HCFM HCFN HCFO | T-Cell PHA 24 hrs | pSport 1 | LP10 |
| HADA HADC HADD HADE HADF | Human Adipose | pSport 1 | LP10 |
| HADG | | | |
| HOVA HOVB HOVC | Human Ovary | pSport 1 | LP10 |
| HTWB HTWC HTWD HTWE HTWF | Resting T-Cell Library, II | pSport 1 | LP10 |
| HMMA | Spleen metastic melanoma | pSport 1 | LP10 |
| HLYA HLYB HLYC HLYD HLYE | Spleen, Chronic lymphocytic | pSport 1 | LP10 |
| | leukemia | | |
| HCGA | CD34 + cell, I | pSport 1 | LP10 |
| HEOM HEON | Human Eosinophils | pSport 1 | LP10 |
| HTDA | Human Tonsil, Lib 3 | pSport 1 | LP10 |
| HSPA | Salivary Gland, Lib 2 | pSport 1 | LP10 |
| HCHA HCHB HCHC | Breast Cancer cell line, MDA 36 | pSport 1 | LP10 |
| HCHM HCHN | Breast Cancer Cell line, angiogenic | pSport 1 | LP10 |
| HCIA | Crohn's Disease | pSport 1 | LP10 |
| HDAA HDAB HDAC | HEL cell line | pSport 1 | LP10 |
| HABA | Human Astrocyte | pSport 1 | LP10 |
| HUFA HUFB HUFC | Ulcerative Colitis | pSport 1 | LP10 |
| HNTM | NTERA2 + retinoic acid, 14 days | pSport 1 | LP10 |
| HDQA | Primary Dendritic cells, CapFinder2, | pSport 1 | LP10 |
| | frac 1 | | |
| HDQM | Primary Dendritic Cells, CapFinder, | pSport 1 | LP10 |
| | frac 2 | | |
| HLDX | Human Liver, normal, CapFinder | pSport 1 | LP10 |
| HULA HULB HULC | Human Dermal Endothelial | pSport1 | LP10 |
| | Cells, untreated | | |
| HUMA | Human Dermal Endothelial | pSport1 | LP10 |
| | cells, treated | | |
| HCJA | Human Stromal Endometrial | pSport1 | LP10 |
| | fibroblasts, untreated | | |
| HCJM | Human Stromal endometrial | pSport1 | LP10 |
| | fibroblasts, treated w/ estradiol | | |
| HEDA | Human Stromal endometrial | pSport1 | LP10 |
| | fibroblasts, treated with progesterone | | |
| HFNA | Human ovary tumor cell OV350721 | pSport1 | LP10 |
| HKGA HKGB HKGC HKGD | Merkel Cells | pSport1 | LP10 |
| HISA HISB HISC | Pancreas Islet Cell Tumor | pSport1 | LP10 |
| HLSA | Skin, burned | pSport1 | LP10 |
| HBZA | Prostate, BPH, Lib 2 | pSport 1 | LP10 |
| HBZS | Prostate BPH, Lib 2, subtracted | pSport 1 | LP10 |
| HFIA HFIB HFIC | Synovial Fibroblasts (control) | pSport 1 | LP10 |
| HFIH HFII HFIJ | Synovial hypoxia | pSport 1 | LP10 |
| HFIT HFIU HFIV | Synovial IL-1/TNF stimulated | pSport 1 | LP10 |
| HGCA | Messangial cell, frac 1 | pSport1 | LP10 |
| HMVA HMVB HMVC | Bone Marrow Stromal Cell, untreated | pSport1 | LP10 |
| HFIX HFIY HFIZ | Synovial Fibroblasts (I11/TNF), subt | pSport1 | LP10 |
| HFOX HFOY HFOZ | Synovial hypoxia-RSF subtracted | pSport1 | LP10 |
| HMQA HMQB HMQC HMQD | Human Activated Monocytes | Uni-ZAP XR | LP11 |
| HLIA HLIB HLIC | Human Liver | pCMVSport 1 | LP012 |
| HHBA HHBB HHBC HHBD HHBE | Human Heart | pCMVSport 1 | LP012 |
| HBBA HBBB | Human Brain | pCMVSport 1 | LP012 |
| HLJA HLJB HLJC HLJD HLJE | Human Lung | pCMVSport 1 | LP012 |
| HOGA HOGB HOGC | Ovarian Tumor | pCMVSport 2.0 | UP012 |
| HTJM | Human Tonsils, Lib 2 | pCMVSport 2.0 | LP012 |
| HAMF HAMG | KMH2 | pCMVSport 3.0 | LP012 |
| HAJA HAJB HAJC | L428 | pCMVSport 3.0 | LP012 |
| HWBA HWBB HWBC HWBD HWBE | Dendritic cells, pooled | pCMVSport 3.0 | LP012 |
| HWAA HWAB HWAC HWAD HWAE | Human Bone Marrow, treated | pCMVSport 3.0 | LP012 |
| HYAA HYAB HYAC | B Cell lymphoma | pCMVSport 3.0 | LP012 |
| HWHG HWHH HWHI | Healing groin wound, 6.5 hours post | pCMVSport 3.0 | LP012 |
| | incision | | |
| HWHP HWHQ HWHR | Healing groin wound; 7.5 hours post | pCMVSport 3.0 | LP012 |
| | incision | | |
| HARM | Healing groin wound - zero hr post- | pCMVSport 3.0 | LP012 |
| | incision (control) | | |
| HBIM | Olfactory epithelium; nasalcavity | pCMVSport 3.0 | LP012 |
| HWDA | Healing Abdomen wound; 70&90 | pCMVSport 3.0 | LP012 |
| | min post incision | | |
| HWEA | Healing Abdomen Wound; 15 days | pCMVSport 3.0 | LP012 |
| | post incision | | |
| HWJA | Healing Abdomen Wound; 21&29 | pCMVSport 3.0 | LP012 |
| | days | | |
| HNAL | Human Tongue, frac2 | pSport1 | LP012 |
| HMJA | H. Meniingima, M6 | pSport1 | LP012 |
| HMKA HMKB HMKC HMKD HMKE | H. Meningima, M1 | pSport1 | LP012 |
| HOFA | Ovarian Tumor I, OV5232 | pSport1 | LP012 |
| HCFA HCFB HCFC HCFD | T-Cell PHA 16 hrs | pSport1 | LP012 |
| HCFL HCFM HCFN HCFO | T-Cell PHA 24 hrs | pSport1 | LP012 |
| HMMA HMMB HMMC | Spleen metastic melanoma | pSport1 | LP012 |
| HTDA | Human Tonsil, Lib 3 | pSport1 | LP012 |
| HDBA | Human Fetal Thymus | pSport1 | LP012 |
| HDUA | Pericardium | pSport1 | LP012 |
| HBZA | Prostate, BPH, Lib 2 | pSport1 | LP012 |
| HWCA | Larynx tumor | pSport1 | LP012 |
| HWKA | Normal lung | pSport1 | LP012 |
| HSMB | Bone marrow stroma, treated | pSport1 | LP012 |
| HBHM | Normal trachea | pSport1 | LP012 |
| HLFC | Human Larynx | pSport1 | LP012 |
| HLRB | Siebben Polyposis | pSport1 | LP012 |
| HNIA | Mammary Gland | pSport1 | LP012 |
| HNJB | Palate carcinoma | pSport1 | LP012 |
| HNKA | Palate normal | pSport1 | LP012 |
| HMZA | Pharynx carcinoma | pSport1 | LP012 |
| HABG | Cheek Carcinoma | pSport1 | LP012 |
| HMZM | Pharynx Carcinoma | pSport1 | LP012 |
| HDRM | Larynx Carcinoma | pSport1 | LP012 |
| HVAA | Pancreas normal PCA4 No | pSport1 | LP012 |
| HICA | Tongue carcinoma | pSport1 | LP012 |
| HUKA HUKB HUKC HUKD HUKE | Human Uterine Cancer | Lambda ZAP II | LP013 |
| HFFA | Human Fetal Brain, random primed | Lambda ZAP II | LP013 |
| HTUA | Activated T-cell labeled with 4- | Lambda ZAP II | LP013 |
| | thioluri | | |
| HBQA | Early Stage Human Brain, random | Lambda ZAP II | LP013 |
| | primed | | |
| HMEB | Human microvascular Endothelial | Lambda ZAP II | LP013 |
| | cells, fract. B | | |
| HUSH | Human Umbilical Vein Endothelial | Lambda ZAP II | LP013 |
| | cells, fract. A, re-excision | | |
| HLQC HLQD | Hepatocellular tumor, re-excision | Lambda ZAP II | LP013 |
| HTWJ HTWK HTWL | Resting T-cell, re-excision | Lambda ZAP II | LP013 |
| HF6S | Human Whole 6 week Old Embryo | pBluescript | LP013 |
| | (II), subt | | |
| HHPS | Human Hippocampus, subtracted | pBluescript | LP013 |
| HL1S | LNCAP, differential expression | pBluescript | LP013 |
| HLHS HLHT | Early Stage Human Lung, Subtracted | pBluescript | LP013 |
| HSUS | Supt cells, cyclohexamide treated, | pBluescript | LP013 |
| | subtracted | | |
| HSUT | Supt cells, cyclohexamide treated, | pBluescript | LP013 |
| | differentially expressed | | |
| HSDS | H. Striatum Depression, subtracted | pBluescript | LP013 |
| HPTZ | Human Pituitary, Subtracted VII | pBluescript | LP013 |
| HSDX | H. Striatum Depression, subt II | pBluescript | LP013 |
| HSDZ | H. Striatum Depression, subt | pBluescript | LP013 |
| HPBA HPBB HPBC HPBD HPBE | Human Pineal Gland | pBluescript SK- | LP013 |
| HRTA | Colorectal Tumor | pBluescript SK- | LP013 |
| HSBA HSBB HSBC HSBM | HSC172 cells | pBluescript SK- | LP013 |
| HJAA HJAB HJAC HJAD | Jurkat T-cell G1 phase | pBluescript SK- | LP013 |
| HJBA HJBB HJBC HJBD | Jurkat T-cell, S1 phase | pBluescript SK- | LP013 |
| HTNA HTNB | Human Thyroid | pBluescript SK- | LP013 |
| HAHA HAHB | Human Adult Heart | Uni-ZAP XR | LP013 |
| HE6A | Whole 6 week Old Embryo | Uni-ZAP XR | LP013 |
| HFCA HFCB HFCC HFCD HFCE | Human Fetal Brain | Uni-ZAP XR | LP013 |
| HFKC HFKD HFKE HFKF HFKG | Human Fetal Kidney | Uni-ZAP XR | LP013 |
| HGBA HGBD HGBE HGBF HGBG | Human Gall Bladder | Uni-ZAP XR | LP013 |
| HPRA HPRB HPRC HPRD | Human Prostate | Uni-ZAP XR | LP013 |
| HTEA HTEB HTEC HTED HTEE | Human Testes | Uni-ZAP XR | LP013 |
| HTTA HTTB HTTC HTTD HTTE | Human Testes Tumor | Uni-ZAP XR | LP013 |
| HYBA HYBB | Human Fetal Bone | Uni-ZAP XR | LP013 |
| HFLA | Human Fetal Liver | Uni-ZAP XR | LP013 |
| HHFB HHFC HHFD HHFE HHFF | Human Fetal Heart | Uni-ZAP XR | LP013 |
| HUVB HUVC HUVD HUVE | Human Umbilical Vein, End. remake | Uni-ZAP XR | LP013 |
| HTHB HTHC HTHD | Human Thymus | Uni-ZAP XR | LP013 |
| HSTA HSTB HSTC HSTD | Human Skin Tumor | Uni-ZAP XR | LP013 |
| HTAA HTAB HTAC HTAD HTAE | Human Activated T-cells | Uni-ZAP XR | LP013 |
| HFEA HFEB HFEC | Human Fetal Epithelium (skin) | Uni-ZAP XR | LP013 |
| HJPA HJPB HJPC HJPD | Human Jurkat Membrane Bound | Uni-ZAP XR | LP013 |
| | Polysomes | | |
| HESA | Human Epithelioid Sarcoma | Uni-ZAP XR | LP013 |
| HALS | Human Adult Liver, Subtracted | Uni-ZAP XR | LP013 |
| HFTA HFTB HFTC HFTD | Human Fetal Dura Mater | Uni-ZAP XR | LP013 |
| HCAA HCAB HCAC | Cem cells, cyclohexamide treated | Uni-ZAP XR | LP013 |
| HRGA HRGB HRGC HRGD | Raji Cells, cyclohexamide treated | Uni-ZAP XR | LP013 |
| HE9A HE9B HE9C HE9D HE9E | Nine Week Old Early Stage Human | Uni-ZAP XR | LP013 |
| HSFA | Human Fibrosarcoma | Uni-ZAP XR | LP013 |
| HATA HATB HATC HATD HATE | Human Adrenal Gland Tumor | Uni-ZAP XR | LP013 |
| HTRA | Human Trachea Tumor | Uni-ZAP XR | LP013 |
| HE2A HE2D HE2E HE2H HE2I | 12 Week Old Early Stage Human | Uni-ZAP XR | LP013 |
| HE2B HE2C HE2F HE2G HE2P | 12 Week Old Early Stage Human, II | Uni-ZAP XR | LP013 |
| HNEA HNEB HNEC HNED HNEE | Human Neutrophil | Uni-ZAP XR | LP013 |
| HBGA | Human Primary Breast Cancer | Uni-ZAP XR | LP013 |
| HPTS HPTT HPTU | Human Pituitary, subtracted | Uni-ZAP XR | LP013 |
| HMQA HMQB HMQC HMQD | Human Activated Monocytes | Uni-ZAP XR | LP013 |
| HOAA HOAB HOAC | Human Osteosarcoma | Uni-ZAP XR | LP013 |
| HTOA HTOD HTOE HTOF HTOG | human tonsils | Uni-ZAP XR | LP013 |
| HMGB | Human OB MG63 control fraction I | Uni-ZAP XR | LP013 |
| HOPB | Human OB HOS control fraction I | Uni-ZAP XR | LP013 |
| HOQB | Human OB HOS treated (1 nM E2) | Uni-ZAP XR | LP013 |
| | fraction I | | |
| HAUA HAUB HAUC | Amniotic Cells - TNF induced | Uni-ZAP XR | LP013 |
| HAQA HAQB HAQC HAQD | Amniotic Cells - Primary Culture | Uni-ZAP XR | LP013 |
| HROA HROC | HUMAN STOMACH | Uni-ZAP XR | LP013 |
| HBJA HBJB HBJC HBJD HBJE | HUMAN B CELL LYMPHOMA | Uni-ZAP XR | LP013 |
| HODA HODB HODC HODD | human ovarian cancer | Uni-ZAP XR | LP013 |
| HCPA | Corpus Callosum | Uni-ZAP XR | LP013 |
| HSOA | stomach cancer (human) | Uni-ZAP XR | LP013 |
| HERA | SKIN | Uni-ZAP XR | LP013 |
| HMDA | Brain-medulloblastoma | Uni-ZAP XR | LP013 |
| HGLA HGLB HGLD | Glioblastoma | Uni-ZAP XR | LP013 |
| HWTA HWTB HWTC | wilm's tumor | Uni-ZAP XR | LP013 |
| HEAA | H. Atrophic Endometrium | Uni-ZAP XR | LP013 |
| HAPN HAPO HAPP HAPQ HAPR | Human Adult Pulmonary; re-excision | Uni-ZAP XR | LP013 |
| HLTG HLTH | Human T-cell lymphoma; re-excision | Uni-ZAP XR | LP013 |
| HAHC HAHD HAHE | Human Adult Heart; re-excision | Uni-ZAP XR | LP013 |
| HAGA HAGB HAGC HAGD HAGE | Human Amygdala | Uni-ZAP XR | LP013 |
| HSJA HSJB HSJC | Smooth muscle-ILb induced | Uni-ZAP XR | LP013 |
| HSHA HSHB HSHC | Smooth muscle, IL1b induced | Uni-ZAP XR | LP013 |
| HPWA HPWB HPWC HPWD HPWE | Prostate BPH | Uni-ZAP XR | LP013 |
| HPIA HPIB HPIC | LNCAP prostate cell line | Uni-ZAP XR | LP013 |
| HPJA HPJB HPJC | PC3 Prostate cell line | Uni-ZAP XR | LP013 |
| HBTA | Bone Marrow Stroma, TNF&LPS ind | Uni-ZAP XR | LP013 |
| HMCF HMCG HMCH HMCI HMCJ | Macrophage-oxLDL; re-excision | Uni-ZAP XR | LP013 |
| HAGG HAGH HAGI | Human Amygdala; re-excision | Uni-ZAP XR | LP013 |
| HACA | H. Adipose Tissue | Uni-ZAP XR | LP013 |
| HKFB | K562 + PMA (36 hrs), re-excision | ZAP Express | LP013 |
| HCWT HCWU HCWV | CD34 positive cells (cord blood), re- | ZAP Express | LP013 |
| | ex | | |
| HBWA | Whole brain | ZAP Express | LP013 |
| HBXA HBXB HBXC HBXD | Human Whole Brain #2 - Oligo dT > | ZAP Express | LP013 |
| | 1.5 Kb | | |
| HAVM | Temporal cortex-Alzheizmer | pT-Adv | LP014 |
| HAVT | Hippocampus, Alzheimer Subtracted | pT-Adv | LP014 |
| HHAS | CHME Cell Line | Uni-ZAP XR | LP014 |
| HAJR | Larynx normal | pSport 1 | LP014 |
| HWLE HWLF HWLG HWLH | Colon Normal | pSport 1 | LP014 |
| HCRM HCRN HCRO | Colon Carcinoma | pSport 1 | LP014 |
| HWLI HWLJ HWLK | Colon Normal | pSport 1 | LP014 |
| HWLQ HWLR HWLS HWLT | Colon Tumor | pSport 1 | LP014 |
| HBFM | Gastrocnemius Muscle | pSport 1 | LP014 |
| HBOD HBOE | Quadriceps Muscle | pSport 1 | LP014 |
| HBKD HBKE | Soleus Muscle | pSport 1 | LP014 |
| HCCM | Pancreatic Langerhans | pSport 1 | LP014 |
| HWGA | Larynx carcinoma | pSport 1 | LP014 |
| HWGM HWGN | Larynx carcinoma | pSport 1 | LP014 |
| HWLA HWLB HWLC | Normal colon | pSport 1 | LP014 |
| HWLM HWLN | Colon Tumor | pSport 1 | LP014 |
| HVAM HVAN HVAO | Pancreas Tumor | pSport 1 | LP014 |
| HWGQ | Larynx carcinoma | pSport 1 | LP014 |
| HAQM HAQN | Salivary Gland | pSport 1 | LP014 |
| HASM | Stomach; normal | pSport 1 | LP014 |
| HBCM | Uterus; normal | pSport 1 | LP014 |
| HCDM | Testis; normal | pSport 1 | LP014 |
| HDJM | Brain; normal | pSport 1 | LP014 |
| HEFM | Adrenal Gland, normal | pSport 1 | LP014 |
| HBAA | Rectum normal | pSport 1 | LP014 |
| HFDM | Rectum tumour | pSport 1 | LP014 |
| HGAM | Colon, normal | pSport 1 | LP014 |
| HHMM | Colon, tumour | pSport 1 | LP014 |
| HCLB HCLC | Human Lung Cancer | Lambda Zap II | LP015 |
| HRLA | L1 Cell line | ZAP Express | LP015 |
| HHAM | Hypothalamus, Alzheimer's | pCMVSport 3.0 | LP015 |
| HKBA | Ku 812F Basophils Line | pSport 1 | LP015 |
| HS2S | Saos2, Dexamethosome Treated | pSport 1 | LP016 |
| HA5A | Lung Carcinoma A549 TNFalpha | pSport 1 | LP016 |
| | activated | | |
| HTFM | TF-1 Cell Line GM-CSF Treated | pSport 1 | LP016 |
| HYAS | Thyroid Tumour | pSport 1 | LP016 |
| HUTS | Larynx Normal | pSport 1 | LP016 |
| HXOA | Larynx Tumor | pSport 1 | LP016 |
| HEAH | Ea.hy.926 cell line | pSport 1 | LP016 |
| HINA | Adenocarcinoma Human | pSport 1 | LP016 |
| HRMA | Lung Mesothelium | pSport 1 | LP016 |
| HLCL | Human Pre-Differentiated Adipocytes | Uni-Zap XR | LP017 |
| HS2A | Saos2 Cells | pSport 1 | LP020 |
| HS2I | Saos2 Cells; Vitamin D3 Treated | pSport 1 | LP020 |
| HUCM | CHME Cell Line, untreated | pSport 1 | LP020 |
| HEPN | Aryepiglottis Normal | pSport 1 | LP020 |
| HPSN | Sinus Piniformis Tumour | pSport 1 | LP020 |
| HNSA | Stomach Normal | pSport 1 | LP020 |
| HNSM | Stomach Tumour | pSport 1 | LP020 |
| HNLA | Liver Normal Met5No | pSport 1 | LP020 |
| HUTA | Liver Tumour Met 5 Tu | pSport 1 | LP020 |
| HOCN | Colon Normal | pSport 1 | LP020 |
| HOCT | Colon Tumor | pSport 1 | LP020 |
| HTNT | Tongue Tumour | pSport 1 | LP020 |
| HLXN | Larynx Normal | pSport 1 | LP020 |
| HLXT | Larynx Tumour | pSport 1 | LP020 |
| HTYN | Thymus | pSport 1 | LP020 |
| HPLN | Placenta | pSport 1 | LP020 |
| HTNG | Tongue Normal | pSport 1 | LP020 |
| HZAA | Thyroid Normal (SDCA2 No) | pSport 1 | LP020 |
| HWES | Thyroid Thyroiditis | pSport 1 | LP020 |
| HFHD | Ficolled Human Stromal Cells, 5Fu | pTrip1Ex2 | LP021 |
| | treated | | |
| HFHM, HFHN | Ficolled Human Stromal Cells, | pTrip1Ex2 | LP021 |
| | Untreated | | |
| HPCI | Hep G2 Cells, lambda library | lambda Zap-CMV XR | LP021 |
| HBCA, HBCB, HBCC | H. Lymph node breast Cancer | Uni-ZAP XR | LP021 |
| HCOK | Chondrocytes | pSPORT1 | LP022 |
| HDCA, HDCB, HDCC | Dendritic Cells From CD34 Cells | pSPORT1 | LP022 |
| HDMA, HDMB | CD40 activated monocyte dendritic | pSPORT1 | LP022 |
| | cells | | |
| HDDM, HDDN, HDDO | LPS activated derived dendritic cells | pSPORT1 | LP022 |
| HPCR | Hep G2 Cells, PCR library | lambda Zap-CMV XR | LP022 |
| HAAA, HAAB, HAAC | Lung, Cancer (4005313A3): Invasive | pSPORT1 | LP022 |
| | Poorly Differentiated Lung | | |
| | Adenocarcinoma | | |
| HIPA, HIPB, HIPC | Lung, Cancer (4005163 B7): | pSPORT1 | LP022 |
| | Invasive, Poorly Diff. | | |
| | Adenocarcinoma, Metastatic | | |
| HOOH, HOOI | Ovary, Cancer: (4004562 B6) | pSPORT1 | LP022 |
| | Papillary Serous Cystic Neoplasm, | | |
| | Low Malignant Pot | | |
| HIDA | Lung, Normal: (4005313 B1) | pSPORT1 | LP022 |
| HUJA, HUJB, HUJC, HUJD, HUJE | B-Cells | pCMVSport 3.0 | LP022 |
| HNOA, HNOB, HNOC, HNOD | Ovary, Normal: (9805C040R) | pSPORT1 | LP022 |
| HNLM | Lung, Normal: (4005313 B1) | pSPORT1 | LP022 |
| HSCL | Stromal Cells | pSPORT1 | LP022 |
| HAAX | Lung, Cancer: (4005313 A3) Invasive | pSPORT1 | LP022 |
| | Poorly-differentiated Metastatic lung | | |
| | adenocarcinoma | | |
| HUUA, HUUB, HUUC, HUUD | B-cells (unstimulated) | pTrip1Ex2 | LP022 |
| HWWA, HWWB, HWWC, HWWD, HW | B-cells (stimulated) | pSPORT1 | LP022 |
| WE, HWWF, HWWG | | | |
| HCCC | Colon, Cancer: (9808C064R) | pCMVSport 3.0 | LP023 |
| HPDO HPDP HPDQ HPDR HPD | Ovary, Cancer (9809C332): Poorly | pSport 1 | LP023 |
| | differentiated adenocarcinoma | | |
| HPCO HPCP HPCQ HPCT | Ovary, Cancer (15395A1F): Grade II | pSport 1 | LP023 |
| | Papillary Carcinoma | | |
| HOCM HOCO HOCP HOCQ | Ovary, Cancer: (15799A1F) Poorly | pSport 1 | LP023 |
| | differentiated carcinoma | | |
| HCBM HCBN HCBO | Breast, Cancer: (4004943 A5) | pSport 1 | LP023 |
| HNBT HNBU HNBV | Breast, Normal: (4005522B2) | pSport 1 | LP023 |
| HBCP HBCQ | Breast, Cancer: (4005522 A2) | pSport 1 | LP023 |
| HBCJ | Breast, Cancer: (9806C012R) | pSport 1 | LP023 |
| HSAM HSAN | Stromal cells 3.88 | pSport 1 | LP023 |
| HVCA HVCB HVCC HVCD | Ovary, Cancer: (4004332 A2) | pSport 1 | LP023 |
| HSCK HSEN HSEO | Stromal cells (HBM3.18) | pSport 1 | LP023 |
| HSCP HSCQ | stromal cell clone 2.5 | pSport 1 | LP023 |
| HUXA | Breast Cancer: (4005385 A2) | pSport 1 | LP023 |
| HCOM HCON HCOO HCOP HCOQ | Ovary, Cancer (4004650 A3): Well- | pSport 1 | LP023 |
| | Differentiated Micropapillary Serous | | |
| | Carcinoma | | |
| HBNM | Breast, Cancer: (9802C020E) | pSport 1 | LP023 |
| HVVA HVVB HVVC HVVD HVVE | Human Bone Marrow, treated | pSport 1 | LP023 |

[0885] Two nonlimiting examples are provided below for isolating a particular clone from the deposited sample of plasmid cDNAs cited for that clone in Table 7. First, a plasmid is directly isolated by screening the clones using a polynucleotide probe corresponding to the nucleotide sequence of SEQ ID NO:X.

[0886] Particularly, a specific polynucleotide with 30-40 nucleotides is synthesized using an Applied Biosystems DNA synthesizer according to the sequence reported. The oligonucleotide is labeled, for instance, with ³²P-γ-ATP using T4 polynucleotide kinase and purified according to routine methods. (E.g., Maniatis et al., Molecular Cloning: A Laboratory Manual, Cold Spring Harbor Press, Cold Spring, N.Y. (1982)). The plasmid mixture is transformed into a suitable host, as indicated above (such as XL-1 Blue (Stratagene)) using techniques known to those of skill in the art, such as those provided by the vector supplier or in related publications or patents cited above. The transformants are plated on 1.5% agar plates (containing the appropriate selection agent, e.g., ampicillin) to a density of about 150 transformants (colonies) per plate. These plates are screened using Nylon membranes according to routine methods for bacterial colony screening (e.g., Sambrook et al., Molecular Cloning: A Laboratory Manual, 2nd Edit., (1989), Cold Spring Harbor Laboratory Press, pages 1.93 to 1.104), or other techniques known to those of skill in the art.

[0887] Alternatively, two primers of 17-20 nucleotides derived from both ends of the nucleotide sequence of SEQ ID NO:X are synthesized and used to amplify the desired cDNA using the deposited cDNA plasmid as a template. The polymerase chain reaction is carried out under routine conditions, for instance, in 25 μl of reaction mixture with 0.5 ug of the above cDNA template. A convenient reaction mixture is 1.5-5 mM MgCl₂, 0.01% (w/v) gelatin, 20 μM each of dATP, dCTP, dGTP, dTTP, 25 pmol of each primer and 0.25 Unit of Taq polymerase. Thirty five cycles of PCR (denaturation at 94° C. for 1 min; annealing at 55° C. for 1 min; elongation at 72° C. for 1 min) are performed with a Perkin-Elmer Cetus automated thermal cycler. The amplified product is analyzed by agarose gel electrophoresis and the DNA band with expected molecular weight is excised and purified. The PCR product is verified to be the selected sequence by subcloning and sequencing the DNA product.

[0888] Several methods are available for the identification of the 5′ or 3′ non-coding portions of a gene which may not be present in the deposited clone. These methods include but are not limited to, filter probing, clone enrichment using specific probes, and protocols similar or identical to 5′ and 3′ “RACE” protocols which are well known in the art. For instance, a method similar to 5′ RACE is available for generating the missing 5′ end of a desired full-length transcript. (Fromont-Racine et al., Nucleic Acids Res. 21(7): 1683-1684 (1993)).

[0889] Briefly, a specific RNA oligonucleotide is ligated to the 5′ ends of a population of RNA presumably containing full-length gene RNA transcripts. A primer set containing a primer specific to the ligated RNA oligonucleotide and a primer specific to a known sequence of the gene of interest is used to PCR amplify the 5′ portion of the desired full-length gene. This amplified product may then be sequenced and used to generate the full length gene.

[0890] This above method starts with total RNA isolated from the desired source, although poly-A+ RNA can be used. The RNA preparation can then be treated with phosphatase if necessary to eliminate 5′ phosphate groups on degraded or damaged RNA which may interfere with the later RNA ligase step. The phosphatase should then be inactivated and the RNA treated with tobacco acid pyrophosphatase in order to remove the cap structure present at the 5′ ends of messenger RNAs. This reaction leaves a 5′ phosphate group at the 5′ end of the cap cleaved RNA which can then be ligated to an RNA oligonucleotide using T4 RNA ligase.

[0891] This modified RNA preparation is used as a template for first strand cDNA synthesis using a gene specific oligonucleotide. The first strand synthesis reaction is used as a template for PCR amplification of the desired 5′ end using a primer specific to the ligated RNA oligonucleotide and a primer specific to the known sequence of the gene of interest. The resultant product is then sequenced and analyzed to confirm that the 5′ end sequence belongs to the desired gene.

### Example 2

### Isolation of Genomic Clones Corresponding to a Polynucleotide

[0892] A human genomic P1 library (Genomic Systems, Inc.) is screened by PCR using primers selected for the sequence corresponding to SEQ ID NO:X according to the method described in Example 1. (See also, Sambrook.)

### Example 3

### Tissue Specific Expression Analysis

[0893] The Human Genome Sciences, Inc. (HGS) database is derived from sequencing tissue and/or disease specific cDNA libraries. Libraries generated from a particular tissue are selected and the specific tissue expression pattern of EST groups or assembled contigs within these libraries is determined by comparison of the expression patterns of those groups or contigs within the entire database. ESTs and assembled contigs which show tissue specific expression are selected.

[0894] The original clone from which the specific EST sequence was generated, or in the case of an assembled contig, the clone from which the 5′ most EST sequence was generated, is obtained from the catalogued library of clones and the insert amplified by PCR using methods known in the art. The PCR product is denatured and then transferred in 96 or 384 well format to a nylon membrane (Schleicher and Scheull) generating an array filter of tissue specific clones. Housekeeping genes, maize genes, and known tissue specific genes are included on the filters. These targets can be used in signal normalization and to validate assay sensitivity. Additional targets are included to monitor probe length and specificity of hybridization.

[0895] Radioactively labeled hybridization probes are generated by first strand cDNA synthesis per the manufacturer's instructions (Life Technologies) from mRNA/RNA samples prepared from the specific tissue being analyzed (e.g., prostate, prostate cancer, ovarian, ovarian cancer, etc.). The hybridization probes are purified by gel exclusion chromatography, quantitated, and hybridized with the array filters in hybridization bottles at 65° C. overnight. The filters are washed under stringent conditions and signals are captured using a Fuji phosphorimager.

[0896] Data is extracted using AIS software and following background subtraction, signal normalization is performed. This includes a normalization of filter-wide expression levels between different experimental runs. Genes that are differentially expressed in the tissue of interest are identified.

### Example 4

### Chromosomal Mapping of the Polynucleotides

[0897] An oligonucleotide primer set is designed according to the sequence at the 5′ end of SEQ ID NO:X. This primer preferably spans about 100 nucleotides. This primer set is then used in a polymerase chain reaction under the following set of conditions: 30 seconds, 95° C.; 1 minute, 56° C.; 1 minute, 70° C. This cycle is repeated 32 times followed by one 5 minute cycle at 70° C. Human, mouse, and hamster DNA is used as template in addition to a somatic cell hybrid panel containing individual chromosomes or chromosome fragments (Bios, Inc). The reactions are analyzed on either 8% polyacrylamide gels or 3.5% agarose gels. Chromosome mapping is determined by the presence of an approximately 100 bp PCR fragment in the particular somatic cell hybrid.

### Example 5

### Bacterial Expression of a Polypeptide

[0898] A polynucleotide encoding a polypeptide of the present invention is amplified using PCR oligonucleotide primers corresponding to the 5′ and 3′ ends of the DNA sequence, as outlined in Example 1, to synthesize insertion fragments. The primers used to amplify the cDNA insert should preferably contain restriction sites, such as BamHI and XbaI, at the 5′ end of the primers in order to clone the amplified product into the expression vector. For example, BamHI and XbaI correspond to the restriction enzyme sites on the bacterial expression vector pQE-9 (Qiagen, Inc., Chatsworth, Calif.). This plasmid vector encodes antibiotic resistance (Amp^{r}), a bacterial origin of replication (ori), an IPTG-regulatable promoter/operator (P/O), a ribosome binding site (RBS), a 6-histidine tag (6-His), and restriction enzyme cloning sites.

[0899] The pQE-9 vector is digested with BamHI and XbaI and the amplified fragment is ligated into the pQE-9 vector maintaining the reading frame initiated at the bacterial RBS. The ligation mixture is then used to transform the E. coli strain M15/rep4 (Qiagen, Inc.) which contains multiple copies of the plasmid pREP4, which expresses the lacI repressor and also confers kanamycin resistance (Kan^{r}). Transformants are identified by their ability to grow on LB plates and ampicillin/kanamycin resistant colonies are selected. Plasmid DNA is isolated and confirmed by restriction analysis.

[0900] Clones containing the desired constructs are grown overnight (O/N) in liquid culture in LB media supplemented with both Amp (100 ug/ml) and Kan (25 ug/ml). The O/N culture is used to inoculate a large culture at a ratio of 1:100 to 1:250. The cells are grown to an optical density 600 (O.D.⁶⁰⁰) of between 0.4 and 0.6. IPTG (Isopropyl-B-D-thiogalacto pyranoside) is then added to a final concentration of 1 mM. IPTG induces by inactivating the lacI repressor, clearing the P/O leading to increased gene expression.

[0901] Cells are grown for an extra 3 to 4 hours. Cells are then harvested by centrifugation (20 mins at 6000× g). The cell pellet is solubilized in the chaotropic agent 6 Molar Guanidine HCl by stirring for 3-4 hours at 4° C. The cell debris is removed by centrifugation, and the supernatant containing the polypeptide is loaded onto a nickel-nitrilo-tri-acetic acid (“Ni-NTA”) affinity resin column (available from QIAGEN, Inc., supra). Proteins with a 6× His tag bind to the Ni-NTA resin with high affinity and can be purified in a simple one-step procedure (for details see: The QIAexpressionist (1995) QIAGEN, Inc., supra).

[0902] Briefly, the supernatant is loaded onto the column in 6 M guanidine-HCl, pH 8. The column is first washed with 10 volumes of 6 M guanidine-HCl, pH 8, then washed with 10 volumes of 6 M guanidine-HCl pH 6, and finally the polypeptide is eluted with 6 M guanidine-HCl, pH 5.

[0903] The purified protein is then renatured by dialyzing it against phosphate-buffered saline (PBS) or 50 mM Na-acetate, pH 6 buffer plus 200 mM NaCl. Alternatively, the protein can be successfully refolded while immobilized on the Ni-NTA column. The recommended conditions are as follows: renature using a linear 6M-1M urea gradient in 500 mM NaCl, 20% glycerol, 20 mM Tris/HCl pH 7.4, containing protease inhibitors. The renaturation should be performed over a period of 1.5 hours or more. After renaturation the proteins are eluted by the addition of 250 mM immidazole. Immidazole is removed by a final dialyzing step against PBS or 50 mM sodium acetate pH 6 buffer plus 200 mM NaCl. The purified protein is stored at 4° C. or frozen at −80° C.

[0904] In addition to the above expression vector, the present invention further includes an expression vector, called pHE4a (ATCC Accession Number 209645, deposited on February 25, 1998) which contains phage operator and promoter elements operatively linked to a polynucleotide of the present invention, called pHE4a. (ATCC Accession Number 209645, deposited on Feb. 25, 1998.) This vector contains: 1) a neomycinphosphotransferase gene as a selection marker, 2) an E. coli origin of replication, 3) a T5 phage promoter sequence, 4) two lac operator sequences, 5) a Shine-Delgarno sequence, and 6) the lactose operon repressor gene (lacIq). The origin of replication (oriC) is derived from pUC19 (LTI, Gaithersburg, Md.). The promoter and operator sequences are made synthetically.

[0905] DNA can be inserted into the pHE4a by restricting the vector with NdeI and XbaI, BamHI, XhoI, or Asp718, running the restricted product on a gel, and isolating the larger fragment (the stuffer fragment should be about 310 base pairs). The DNA insert is generated according to the PCR protocol described in Example 1, using PCR primers having restriction sites for NdeI (5′ primer) and XbaI, BamHI, XhoI, or Asp718 (3′ primer). The PCR insert is gel purified and restricted with compatible enzymes. The insert and vector are ligated according to standard protocols.

[0906] The engineered vector could easily be substituted in the above protocol to express protein in a bacterial system.

### Example 6

### Purification of a Polypeptide from an Inclusion Body

[0907] The following alternative method can be used to purify a polypeptide expressed in E. coli when it is present in the form of inclusion bodies. Unless otherwise specified, all of the following steps are conducted at 4-10° C.

[0908] Upon completion of the production phase of the E. coli fermentation, the cell culture is cooled to 4-10° C and the cells harvested by continuous centrifugation at 15,000 rpm (Heraeus Sepatech). On the basis of the expected yield of protein per unit weight of cell paste and the amount of purified protein required, an appropriate amount of cell paste, by weight, is suspended in a buffer solution containing 100 mM Tris, 50 mM EDTA, pH 7.4. The cells are dispersed to a homogeneous suspension using a high shear mixer.

[0909] The cells are then lysed by passing the solution through a microfluidizer (Microfuidics, Corp. or APV Gaulin, Inc.) twice at 4000-6000 psi. The homogenate is then mixed with NaCl solution to a final concentration of 0.5 M NaCl, followed by centrifugation at 7000× g for 15 min. The resultant pellet is washed again using 0.5M NaCl, 100 mM Tris, 50 mM EDTA, pH 7.4.

[0910] The resulting washed inclusion bodies are solubilized with 1.5 M guanidine hydrochloride (GuHCl) for 2-4 hours. After 7000× g centrifugation for 15 min., the pellet is discarded and the polypeptide containing supernatant is incubated at 4° C. overnight to allow further GuHCl extraction.

[0911] Following high speed centrifugation (30,000× g) to remove insoluble particles, the GuHCl solubilized protein is refolded by quickly mixing the GuHCl extract with 20 volumes of buffer containing 50 mM sodium, pH 4.5, 150 mM NaCl, 2 mM EDTA by vigorous stirring. The refolded diluted protein solution is kept at 4° C. without mixing for 12 hours prior to further purification steps.

[0912] To clarify the refolded polypeptide solution, a previously prepared tangential filtration unit equipped with 0.16 μm membrane filter with appropriate surface area (e.g., Filtron), equilibrated with 40 mM sodium acetate, pH 6.0 is employed. The filtered sample is loaded onto a cation exchange resin (e.g., Poros HS-50, Perseptive Biosystems). The column is washed with 40 mM sodium acetate, pH 6.0 and eluted with 250 mM, 500 mM, 1000 mM, and 1500 mM NaCl in the same buffer, in a stepwise manner. The absorbance at 280 nm of the effluent is continuously monitored. Fractions are collected and further analyzed by SDS-PAGE.

[0913] Fractions containing the polypeptide are then pooled and mixed with 4 volumes of water. The diluted sample is then loaded onto a previously prepared set of tandem columns of strong anion (Poros HQ-50, Perseptive Biosystems) and weak anion (Poros CM-20, Perseptive Biosystems) exchange resins. The columns are equilibrated with 40 mM sodium acetate, pH 6.0. Both columns are washed with 40 mM sodium acetate, pH 6.0, 200 mM NaCl. The CM-20 column is then eluted using a 10 column volume linear gradient ranging from 0.2 M NaCl, 50 mM sodium acetate, pH 6.0 to 1.0 M NaCl, 50 mM sodium acetate, pH 6.5. Fractions are collected under constant A₂₈₀ monitoring of the effluent. Fractions containing the polypeptide (determined, for instance, by 16% SDS-PAGE) are then pooled.

[0914] The resultant polypeptide should exhibit greater than 95% purity after the above refolding and purification steps. No major contaminant bands should be observed from Commassie blue stained 16% SDS-PAGE gel when 5 μg of purified protein is loaded. The purified protein can also be tested for endotoxin/LPS contamination, and typically the LPS content is less than 0.1 ng/ml according to LAL assays.

### Example 7

### Cloning and Expression of a Polypeptide in a Baculovirus Expression System

[0915] In this example, the plasmid shuttle vector pA2 is used to insert a polynucleotide into a baculovirus to express a polypeptide. This expression vector contains the strong polyhedrin promoter of the Autographa californica nuclear polyhedrosis virus (AcMNPV) followed by convenient restriction sites such as BamHI, XbaI and Asp7l8. The polyadenylation site of the simian virus 40 (“SV40”) is used for efficient polyadenylation. For easy selection of recombinant virus, the plasmid contains the beta-galactosidase gene from E. coli under control of a weak Drosophila promoter in the same orientation, followed by the polyadenylation signal of the polyhedrin gene. The inserted genes are flanked on both sides by viral sequences for cell-mediated homologous recombination with wild-type viral DNA to generate a viable virus that express the cloned polynucleotide.

[0916] Many other baculovirus vectors can be used in place of the vector above, such as pAc373, pVL941, and pAcIM1, as one skilled in the art would readily appreciate, as long as the construct provides appropriately located signals for transcription, translation, secretion and the like, including a signal peptide and an in-frame AUG as required. Such vectors are described, for instance, in Luckow et al., Virology 170:31-39 (1989).

[0917] Specifically, the cDNA sequence contained in the deposited clone, including the AUG initiation codon, is amplified using the PCR protocol described in Example 1. If a naturally occurring signal sequence is used to produce the polypeptide of the present invention, the pA2 vector does not need a second signal peptide. Alternatively, the vector can be modified (pA2 GP) to include a baculovirus leader sequence, using the standard methods described in Summers et al., “A Manual of Methods for Baculovirus Vectors and Insect Cell Culture Procedures,” Texas Agricultural Experimental Station Bulletin No. 1555 (1987).

[0918] The amplified fragment is isolated from a 1% agarose gel using a commercially available kit (“Geneclean,” BIO 101 Inc., La Jolla, Calif.). The fragment then is digested with appropriate restriction enzymes and again purified on a 1% agarose gel.

[0919] The plasmid is digested with the corresponding restriction enzymes and optionally, can be dephosphorylated using calf intestinal phosphatase, using routine procedures known in the art. The DNA is then isolated from a 1% agarose gel using a commercially available kit (“Geneclean” BIO 101 Inc., La Jolla, Calif.).

[0920] The fragment and the dephosphorylated plasmid are ligated together with T4 DNA ligase. E coli HB101 or other suitable E. coli hosts such as XL-1 Blue (Stratagene Cloning Systems, La Jolla, Calif.) cells are transformed with the ligation mixture and spread on culture plates. Bacteria containing the plasmid are identified by digesting DNA from individual colonies and analyzing the digestion product by gel electrophoresis. The sequence of the cloned fragment is confirmed by DNA sequencing.

[0921] Five μg of a plasmid containing the polynucleotide is co-transfected with 1.0 μg of a commercially available linearized baculovirus DNA (“BaculoGold™ baculovirus DNA, Pharmingen, San Diego, Calif.), using the lipofection method described by Felgner et al., Proc. Natl. Acad. Sci. USA 84:7413-7417 (1987). One μg of BaculoGold™ virus DNA and 5 μg of the plasmid are mixed in a sterile well of a microtiter plate containing 50 μl of serum-free Grace's medium (Life Technologies Inc., Gaithersburg, Md.). Afterwards, 10 μl Lipofectin plus 90 μl Grace's medium are added, mixed and incubated for 15 minutes at room temperature. Then the transfection mixture is added drop-wise to Sf9 insect cells (ATCC CRL 1711) seeded in a 35 mm tissue culture plate with 1 ml Grace's medium without serum. The plate is then incubated for 5 hours at 27° C. The transfection solution is then removed from the plate and 1 ml of Grace's insect medium supplemented with 10% fetal calf serum is added. Cultivation is then continued at 27° C. for four days.

[0922] After four days the supernatant is collected and a plaque assay is performed, as described by Summers and Smith, supra. An agarose gel with “Blue Gal” (Life Technologies Inc., Gaithersburg) is used to allow easy identification and isolation of gal-expressing clones, which produce blue-stained plaques. (A detailed description of a “plaque assay” of this type can also be found in the user's guide for insect cell culture and baculovirology distributed by Life Technologies Inc., Gaithersburg, page 9-10.) After appropriate incubation, blue stained plaques are picked with the tip of a micropipettor (e.g., Eppendorf). The agar containing the recombinant viruses is then resuspended in a microcentrifuge tube containing 200 μl of Grace's medium and the suspension containing the recombinant baculovirus is used to infect Sf9 cells seeded in 35 mm dishes. Four days later the supernatants of these culture dishes are harvested and then they are stored at 4° C.

[0923] To verify the expression of the polypeptide, Sf9 cells are grown in Grace's medium supplemented with 10% heat-inactivated FBS. The cells are infected with the recombinant baculovirus containing the polynucleotide at a multiplicity of infection (“MOI”) of about 2. If radiolabeled proteins are desired, 6 hours later the medium is removed and is replaced with SF900 II medium minus methionine and cysteine (available from Life Technologies Inc., Rockville, Md.). After 42 hours, 5 μCi of ³⁵S-methionine and 5 μCi ³⁵S-cysteine (available from Amersham) are added. The cells are further incubated for 16 hours and then are harvested by centrifugation. The proteins in the supernatant as well as the intracellular proteins are analyzed by SDS-PAGE followed by autoradiography (if radiolabeled).

[0924] Microsequencing of the amino acid sequence of the amino terminus of purified protein may be used to determine the amino'terminal sequence of the produced protein.

### Example 8

### Expression of a Polypeptide in Mammalian Cells

[0925] The polypeptide of the present invention can be expressed in a mammalian cell. A typical mammalian expression vector contains a promoter element, which mediates the initiation of transcription of mRNA, a protein coding sequence, and signals required for the termination of transcription and polyadenylation of the transcript. Additional elements include enhancers, Kozak sequences and intervening sequences flanked by donor and acceptor sites for RNA splicing. Highly efficient transcription is achieved with the early and late promoters from SV40, the long terminal repeats (LTRs) from Retroviruses, e.g., RSV, HTLVI, HIVI and the early promoter of the cytomegalovirus (CMV). However, cellular elements can also be used (e.g., the human actin promoter).

[0926] Suitable expression vectors for use in practicing the present invention include; for example, vectors such as pSVL and pMSG (Pharmacia, Uppsala, Sweden), pRSVcat (ATCC 37152), pSV2dhfr (ATCC 37146), pBC12MI (ATCC 67109), pCMVSport 2.0, and pCMVSport 3.0. Mammalian host cells that could be used include, human Hela, 293, H9 and Jurkat cells, mouse NIH3T3 and C127 cells, Cos 1, Cos 7 and CV1, quail QC1-3 cells, mouse L cells and Chinese hamster ovary (CHO) cells.

[0927] Alternatively, the polypeptide can be expressed in stable cell lines containing the polynucleotide integrated into a chromosome. The co-transfection with a selectable marker such as DHFR, gpt, neomycin, or hygromycin allows the identification and isolation of the transfected cells.

[0928] The transfected gene can also be amplified to express large amounts of the encoded protein. The DHFR (dihydrofolate reductase) marker is useful in developing cell lines that carry several hundred or even several thousand copies of the gene of interest. (See, e.g., Alt, F. W., et al., J. Biol. Chem. 253:1357-1370 (1978); Hamlin, J. L. and Ma, C., Biochem. et Biophys. Acta, 1097:107-143 (1990); Page, M. J. and Sydenham, M. A., Biotechnology 9:64-68 (1991)). Another useful selection marker is the enzyme glutamine synthase (GS) (Murphy et al., Biochem J. 227:277-279 (1991); Bebbington et al., Bio/Technology 10:169-175 (1992). Using these markers, the mammalian cells are grown in selective medium and the cells with the highest resistance are selected. These cell lines contain the amplified gene(s) integrated into a chromosome. Chinese hamster ovary (CHO) and NSO cells are often used for the production of proteins.

[0929] Derivatives of the plasmid pSV2-dhfr (ATCC Accession No. 37146), the expression vectors pC4 (ATCC Accession No. 209646) and pC6 (ATCC Accession No.209647) contain the strong promoter (LTR) of the Rous Sarcoma Virus (Cullen et al., Molecular and Cellular Biology, 438-447 (March, 1985)) plus a fragment of the CMV-enhancer (Boshart et al., Cell 41:521-530 (1985)). Multiple cloning sites, e.g., with the restriction enzyme cleavage sites BamHI, XbaI and Asp718, facilitate the cloning of the gene of interest. The vectors also contain the 3′ intron, the polyadenylation and termination signal of the rat preproinsulin gene, and the mouse DHFR gene under control of the SV40 early promoter.

[0930] Specifically, the plasmid pC6, for example, is digested with appropriate restriction enzymes and then dephosphorylated using calf intestinal phosphates by procedures known in the art. The vector is then isolated from a 1% agarose gel.

[0931] A polynucleotide of the present invention is amplified according to the protocol outlined in Example 1. If a naturally occurring signal sequence is used to produce the polypeptide of the present invention, the vector does not need a second signal peptide. Alternatively, if a naturally occurring signal sequence is not used, the vector can be modified to include a heterologous signal sequence,. (See, e.g., International Publication No. WO 96/34891.)

[0932] The amplified fragment is isolated from a 1% agarose gel using a commercially available kit (“Geneclean,” BIO 101 Inc., La Jolla, Calif.). The fragment then is digested with appropriate restriction enzymes and again purified on a 1% agarose gel.

[0933] The amplified fragment is then digested with the same restriction enzyme and purified on a 1% agarose gel. The isolated fragment and the dephosphorylated vector are then ligated with T4 DNA ligase. E. coli HB101 or XL-1 Blue cells are then transformed and bacteria are identified that contain the fragment inserted into plasmid pC6 using, for instance, restriction enzyme analysis.

[0934] Chinese hamster ovary cells lacking an active DHFR gene is used for transfection. Five μg of the expression plasmid pC6 or pC4 is cotransfected with 0.5 μg of the plasmid pSVneo using lipofectin (Felgner et al., supra). The plasmid pSV2-neo contains a dominant selectable marker, the neo gene from Tn5 encoding an enzyme that confers resistance to a group of antibiotics including G418. The cells are seeded in alpha minus MEM supplemented with 1 mg/ml G418. After 2 days, the cells are trypsinized and seeded in hybridoma cloning plates (Greiner, Germany) in alpha minus MEM supplemented with 10, 25, or 50 ng/ml of methotrexate plus 1 mg/ml G418. After about 10-14 days single clones are trypsinized and then seeded in 6-well petri dishes or 10 ml flasks using different concentrations of methotrexate (50 nM, 100 nM, 200 nM, 400 nM, 800 nM). Clones growing at the highest concentrations of methotrexate are then transferred to new 6-well plates containing even higher concentrations of methotrexate (1 μM, 2 μM, 5 μM, 10 mM, 20 mM). The same procedure is repeated until clones are obtained which grow at a concentration of 100-200 μM. Expression of the desired gene product is analyzed, for instance, by SDS-PAGE and Western blot or by reversed phase HPLC analysis.

### Example 9

### Protein Fusions

[0935] The polypeptides of the present invention are preferably fused to other proteins. These fusion proteins can be used for a variety of applications. For example, fusion of the present polypeptides to His-tag, HA-tag, protein A, IgG domains, and maltose binding protein facilitates purification. (See Example 5; see also EP A 394,827; Traunecker, et al., Nature 331:84-86 (1988)). Similarly, fusion to IgG-1, IgG-3, and albumin increases the halflife time in vivo. Nuclear localization signals fused to the polypeptides of the present invention can target the protein to a specific subcellular localization, while covalent heterodimer or homodimers can increase or decrease the activity of a fusion protein. Fusion proteins can also create chimeric molecules having more than one function. Finally, fusion proteins can increase solubility and/or stability of the fused protein compared to the non-fused protein. All of the types of fusion proteins described above can be made by modifying the following protocol, which outlines the fusion of a polypeptide to an IgG molecule, or the protocol described in Example 5.

[0936] Briefly, the human Fc portion of the IgG molecule can be PCR amplified, using primers that span the 5′ and 3′ ends of the sequence described below. These primers also should have convenient restriction enzyme sites that will facilitate cloning into an expression vector, preferably a mammalian expression vector.

[0937] For example, if pC4 (ATCC Accession No. 209646) is used, the human Fc portion can be ligated into the BamHI cloning site. Note that the 3′ BamHI site should be destroyed. Next, the vector containing the human Fc portion is re-restricted with BamHI, linearizing the vector, and a polynucleotide of the present invention, isolated by the PCR protocol described in Example 1, is ligated into this BamHI site. Note that the polynucleotide is cloned without a stop codon, otherwise a fusion protein will not be produced.

[0938] If the naturally occurring signal sequence is used to produce the polypeptide of the present invention, pC4 does not need a second signal peptide. Alternatively, if the naturally occurring signal sequence is not used, the vector can be modified to include a heterologous signal sequence. (See, e.g., International Publication No. WO 96/34891.)

| | |
|---|---|
| Human IgG Fc region: | |
| GGGATCCGGAGCCCAAATCTTCTGACAAAACTCACACATGCCCACCGTGCCCA | (SEQ ID NO: 1) |
| GCACCTGAATTCGAGGGTGCACCGTCAGTCTTCCTCTTCCCCCCAAAACCCAAG | |
| GACACCCTCATGATCTCCCGGACTCCTGAGGTCACATGCGTGGTGGTGGACGTA | |
| AGCCACGAAGACCCTGAGGTCAAGTTCAACTGGTACGTGGACGGCGTGGAGGT | |
| GCATAATGCCAAGACAAAGCCGCGGGAGGAGCAGTACAACAGCACGTACCGTG | |
| TGGTCAGCGTCCTCACCGTCCTGCACCAGGACTGGCTGAATGGCAAGGAGTAC | |
| AAGTGCAAGGTCTCCAACAAAGCCCTCCCAACCCCCATCGAGAAAACCATCTC | |
| CAAAGCCAAAGGGCAGCCCCGAGAACCACAGGTGTACACCCTGCCCCCATCCC | |
| GGGATGAGCTGACCAAGAACCAGGTCAGCCTGACCTGCCTGGTCAAAGGCTTC | |
| TATCCAAGCGACATCGCCGTGGAGTGGGAGAGCAATGGGCAGCCGGAGAACAA | |
| CTACAAGACCACGCCTCCCGTGCTGGACTCCGACGGCTCCTTCTTCCTCTACAG | |
| CAAGCTCACCGTGGACAAGAGCAGGTGGCAGCAGGGGAACGTCTTCTCATGCT | |
| CCGTGATGCATGAGGCTCTGCACAACCACTACACGCAGAAGAGCCTCTCCCTGT | |
| CTCCGGGTAAATGAGTGCGACGGCCGCGACTCTAGAGGAT | |

### Example 10

### Production of an Antibody from a Polypeptide

[0939] a) Hybridoma Technology

[0940] The antibodies of the present invention can be prepared by a variety of methods. (See, Current Protocols, Chapter 2.) As one example of such methods, cells expressing a polypeptide of the present invention are administered to an animal to induce the production of sera containing polyclonal antibodies. In a preferred method, a preparation of a a polypeptide of the present invention is prepared and purified to render it substantially free of natural contaminants. Such a preparation is then introduced into an animal in order to produce polyclonal antisera of greater specific activity.

[0941] Monoclonal antibodies specific for a polypeptide-of the present invention are prepared using hybridoma technology (Kohler et al., Nature 256:495 (1975); Kohler et al., Eur. J. Immunol. 6:511 (1976); Kohler et al., Eur. J. Immunol. 6:292 (1976); Hammerling et al., in: Monoclonal Antibodies and T-Cell Hybridomas, Elsevier, N.Y., pp. 563-681 (1981)). In general, an animal (preferably a mouse) is immunized with a polypeptide of the present invention or, more preferably, with a secreted polypeptide of the present invention-expressing cell. Such polypeptide-expressing cells are cultured in any suitable tissue culture medium, preferably in Earle's modified Eagle's medium supplemented with 10% fetal bovine serum (inactivated at about 56° C.), and supplemented with about 10 g/l of nonessential amino acids, about 1,000 U/ml of penicillin, and about 100 μg/ml of streptomycin.

[0942] The splenocytes of such mice are extracted and fused with a suitable myeloma cell line. Any suitable myeloma cell line may be employed in accordance with the present invention; however, it is preferable to employ the parent myeloma cell line (SP2O), available from the ATCC. After fusion, the resulting hybridoma cells are selectively maintained in HAT medium, and then cloned by limiting dilution as described by Wands et al. (Gastroenterology 80:225-23.2 (1981)). The hybridoma cells obtained through such a selection are then assayed to identify clones which secrete antibodies capable of binding the polypeptide of the present invention.

[0943] Alternatively, additional antibodies capable of binding to polypeptide of the present invention can be produced in a two-step procedure using anti-idiotypic antibodies. Such a method makes use of the fact that antibodies are themselves antigens, and therefore, it is possible to obtain an antibody which binds to a second antibody. In accordance with this method, protein specific antibodies are used to immunize an animal, preferably a mouse. The splenocytes of such an animal are then used to produce hybridoma cells, and the hybridoma cells are screened to identify clones which produce an antibody whose ability to bind to the polypeptide of the present invention-specific antibody can be blocked by polypeptide of the present invention. Such antibodies comprise anti-idiotypic antibodies to the polypeptide of the present invention-specific antibody and are used to immunize an animal to induce formation of further polypeptide of the present invention-specific antibodies.

[0944] For in vivo use of antibodies in humans, an antibody is “humanized”. Such antibodies can be produced using genetic constructs derived from hybridoma cells producing the monoclonal antibodies described above. Methods for producing chimeric and humanized antibodies are known in the art and are discussed herein. (See, for review, Morrison, Science 229:1202 (1985); Oi et al., BioTechniques 4:214 (1986); Cabilly et al., U.S. Pat. No. 4,816,567; Taniguchi et al., EP 171496; Morrison et al., EP 173494; Neuberger et al., WO 8601533; Robinson et al., International Publication No. WO 8702671; Boulianne et al., Nature 312:643 (1984); Neuberger et al., Nature 314:268 (1985)).

[0945] b) Isolation of Antibody Fragments Directed Against Polypeptide of the Present Invention from a Library of scFvs

[0946] Naturally occurring V-genes isolated from human PBLs are constructed into a library of antibody fragments which contain reactivities against polypeptide of the present invention to which the donor may or may not have been exposed (see e.g., U.S. Pat. No. 5,885,793 incorporated herein by reference in its entirety).

[0947] Rescue of the Library.

[0948] A library of scFvs is constructed from the RNA of human PBLs as described in International Publication No. WO 92/01047. To rescue phage displaying antibody fragments, approximately 10⁹ E. coli harboring the phagemid are used to inoculate 50 ml of 2xTY containing 1% glucose and 100 μg/ml of ampicillin (2xTY-AMP-GLU) and grown to an O.D. of 0.8 with shaking. Five ml of this culture is used to inoculate 50 ml of 2xTY-AMP-GLU, 2×108 TU of delta gene 3 helper (M13 delta gene III, see International Publication No. WO 92/01047) are added and the culture incubated at 37° C. for 45 minutes without shaking and then at 37° C. for 45 minutes with shaking. The culture is centrifuged at 4000 r.p.m. for 10 min. and the pellet resuspended in 2 liters of 2xTY containing 100 μg/ml ampicillin and 50 ug/ml kanamycin and grown overnight. Phage are prepared as described in International Publication No. WO 92/01047.

[0949] M13 delta gene III is prepared as follows: M13 delta gene III helper phage does not encode gene III protein, hence the phage(mid) displaying antibody fragments have a greater avidity of binding to antigen. Infectious M13 delta gene III particles are made by growing the helper phage in cells harboring a pUC19 derivative supplying the wild type gene III protein during phage morphogenesis. The culture is incubated for 1 hour at 37° C. without shaking and then for a further hour at 37° C. with shaking. Cells are spun down (IEC-Centra 8,400 r.p.m. for 10 min), resuspended in 300 ml 2xTY broth containing 100 μg ampicillin/ml and 25 μg kanamycin/ml (2xTY-AMP-KAN) and grown overnight, shaking at 37° C. Phage particles are purified and concentrated from the culture medium by two PEG-precipitations (Sambrook et al., 1990), resuspended in 2 ml PBS and passed through a 0.45 μm filter (Minisart NML; Sartorius) to give a-final concentration of approximately 1013 transducing units/ml (ampicillin-resistant clones).

[0950] Panning of the Library.

[0951] Immunotubes (Nunc) are coated overnight in PBS with 4 ml of either 100 μg/ml or 10 μg/ml of a polypeptide of the present invention. Tubes are blocked with 2% Marvel-PBS for 2 hours at 37° C. and then washed 3 times in PBS. Approximately 10¹³ TU of phage is applied to the tube and incubated for 30 minutes at room temperature tumbling on an over and under turntable and then left to stand for another 1.5 hours. Tubes are washed 10 times with PBS 0.1% Tween-20 and 10 times with PBS. Phage are eluted by adding 1 ml of 100 mM triethylamine and rotating 15 minutes on an under and over turntable after which the solution is immediately neutralized with 0.5 ml of 1.0M Tris-HCl, pH 7.4. Phage are then used to infect 10 ml of mid-log E. coli TG1 by incubating eluted phage with bacteria for 30 minutes at 37° C. The E. coli are then plated on TYE plates containing 1% glucose and 100 μg/ml ampicillin. The resulting bacterial library is then rescued with delta gene 3 helper phage as described above to prepare phage for a subsequent round of selection. This process is then repeated for a total of 4 rounds of affinity purification with tube-washing increased to 20 times with PBS, 0.1% Tween-20 and 20 times with PBS for rounds 3 and 4.

[0952] Characterization of Binders.

[0953] Eluted phage from the 3rd and 4th rounds of selection are used to infect E. coli HB 2151 and soluble scFv is produced (Marks, et al., 1991) from single colonies for assay. ELISAs are performed with microtitre plates coated with either 10 pg/ml of the polypeptide of the present invention in 50 mM bicarbonate pH 9.6. Clones positive in ELISA are further characterized by PCR fingerprinting (see, e.g., International Publication No. WO 92/01047) and then by sequencing. These ELISA positive clones may also be further characterized by techniques known in the art, such as, for example, epitope mapping, binding affinity, receptor signal transduction, ability to block or competitively inhibit antibody/antigen binding, and competitive agonistic or antagonistic activity.

### Example 11

### Method of Determining Alterations in a Gene Corresponding to a Polynucleotide

[0954] RNA isolated from entire families or individual patients presenting with a phenotype of interest (such as a disease) is isolated. cDNA is then generated from these RNA samples using protocols known in the art. (See, Sambrook.) The cDNA is then used as a template for PCR, employing primers surrounding regions of interest in SEQ ID NO:X; and/or the nucleotide sequence of the cDNA contained in Clone ID NO:Z. Suggested PCR conditions consist of 35 cycles at 95 degrees C. for 30 seconds; 60-120 seconds at 52-58 degrees C.; and 60-120 seconds at 70 degrees C., using buffer solutions described in Sidransky et al., Science 252:706 (1991).

[0955] PCR products are then sequenced using primers labeled at their 5′ end with T4 polynucleotide kinase, employing SequiTherm Polymerase (Epicentre Technologies). The intron-exon boundaries of selected exons is also determined and genomic PCR products analyzed to confirm the results. PCR products harboring suspected mutations are then cloned and sequenced to validate the results of the direct sequencing.

[0956] PCR products are cloned into T-tailed vectors as described in Holton et al., Nucleic Acids Research, 19:1156 (1991) and sequenced with T7 polymerase (United States Biochemical). Affected individuals are identified by mutations not present in unaffected individuals.

[0957] Genomic rearrangements are also observed as a method of determining alterations in a gene corresponding to a polynucleotide. Genomic clones isolated according to Example 2 are nick-translated with digoxigenindeoxy-uridine 5′-triphosphate (Boehringer Manheim), and FISH performed as described in Johnson et al., Methods Cell Biol. 35:73-99 (1991). Hybridization with the labeled probe is carried out using a vast excess of human cot-1 DNA for specific hybridization to the corresponding genomic locus.

[0958] Chromosomes are counterstained with 4,6-diamino-2-phenylidole and propidium iodide, producing a combination of C- and R-bands. Aligned images for precise mapping are obtained using a triple-band filter set (Chroma Technology, Brattleboro, Vt.) in combination with a cooled charge-coupled device camera (Photometrics, Tucson, Ariz.) and variable excitation wavelength filters. (Johnson et al., Genet. Anal. Tech. Appl., 8:75 (1991)). Image collection, analysis and chromosomal fractional length measurements are performed using the ISee Graphical Program System. (Inovision Corporation, Durham, NC.) Chromosome alterations of the genomic region hybridized by the probe are identified as insertions, deletions, and translocations. These alterations are used as a diagnostic marker for an associated disease.

### Example 12

### Method of Detecting Abnormal Levels of a Polypeptide in a Biological Sample

[0959] A polypeptide of the present invention can be detected in a biological sample, and if an increased or decreased level of the polypeptide is detected, this polypeptide is a marker for a particular phenotype. Methods of detection are numerous, and thus, it is understood that one skilled in the art can modify the following assay to fit their particular needs.

[0960] For example, antibody-sandwich ELISAs are used to detect polypeptides in a sample, preferably a biological sample. Wells of a microtiter plate are coated with specific antibodies, at a final concentration of 0.2 to 10 ug/ml. The antibodies are either monoclonal or polyclonal and are produced by the method described in Example 10. The wells are blocked so that non-specific binding of the polypeptide to the well is reduced.

[0961] The coated wells are then incubated for >2 hours at RT with a sample containing the polypeptide. Preferably, serial dilutions of the sample should be used to validate results. The plates are then washed three times with deionized or distilled water to remove unbound polypeptide.

[0962] Next, 50 ul of specific antibody-alkaline phosphatase conjugate, at a concentration of 25-400 ng, is added and incubated for 2 hours at room temperature. The plates are again washed three times with deionized or distilled water to remove unbound conjugate.

[0963] Add 75 ul of 4-methylumbelliferyl phosphate (MUP) or p-nitrophenyl phosphate (NPP) substrate solution to each well and incubate 1 hour at room temperature. Measure the reaction by a microtiter plate reader. Prepare a standard curve, using serial dilutions of a control sample, and plot polypeptide concentration on the X-axis (log scale) and fluorescence or absorbance of the Y-axis (linear scale). Interpolate the concentration of the polypeptide in the sample using the standard curve.

### Example 13

### Formulation

[0964] The invention also provides methods of treatment and/or prevention of diseases or disorders (such as, for example, any one or more of the diseases or disorders disclosed herein) by administration to a subject. of an effective amount of a Therapeutic. By therapeutic is meant polynucleotides or polypeptides of the invention (including fragments and variants), agonists or antagonists thereof, and/or antibodies thereto, in combination with a pharmaceutically acceptable carrier type (e.g., a sterile carrier).

[0965] The Therapeutic will be formulated and dosed in a fashion consistent with good medical practice, taking into account the clinical condition of the individual patient (especially the side effects of treatment with the Therapeutic alone), the site of delivery, the method of administration, the scheduling of administration, and other factors known to practitioners. The “effective amount” for purposes herein is thus determined by such considerations.

[0966] As a general proposition, the total pharmaceutically effective amount of the Therapeutic administered parenterally per dose will be in the range of about lug/kg/day to 10 mg/kg/day of patient body weight, although, as noted above, this will be subject to therapeutic discretion. More preferably, this dose is at least 0.01 mg/kg/day, and most preferably for humans between about 0.01 and 1 mg/kg/day for the hormone. If given continuously, the Therapeutic is typically administered at a dose rate of about 1 ug/kg/hour to about 50 ug/kg/hour, either by 1-4 injections per day or by continuous subcutaneous infusions, for example, using a mini-pump. An intravenous bag solution may also be employed. The length of treatment needed to observe changes and the interval following treatment for responses to occur appears to vary depending on the desired effect.

[0967] Therapeutics can be are administered orally, rectally, parenterally, intracistemally, intravaginally, intraperitoneally, topically (as by powders, ointments, gels, drops or transdermal patch), bucally, or as an oral or nasal spray. “Pharmaceutically acceptable carrier” refers to a non-toxic solid, semisolid or liquid filler, diluent, encapsulating material or formulation auxiliary of any. The term “parenteral” as used herein refers to modes of administration which include intravenous, intramuscular, intraperitoneal, intrastemal, subcutaneous and intraarticular injection and infusion.

[0968] Therapeutics of the invention are also suitably administered by sustained-release systems. Suitable examples of sustained-release Therapeutics are administered orally, rectally, parenterally, intracistemally, intravaginally, intraperitoneally, topically (as by powders, ointments, gels, drops or transdermal patch), bucally, or as an oral or nasal spray. “Pharmaceutically acceptable carrier” refers to a non-toxic solid, semisolid or liquid filler, diluent, encapsulating material or formulation auxiliary of any type. The term “parenteral” as used herein refers to modes of administration which include intravenous, intramuscular, intraperitoneal, intrastemal, subcutaneous and intraarticular injection and infusion.

[0969] Therapeutics of the invention are also suitably administered by sustained-release systems. Suitable examples of sustained-release Therapeutics include suitable polymeric materials (such as, for example, semi-permeable polymer matrices in the form of shaped articles, e.g., films, or mirocapsules), suitable hydrophobic materials (for example as an emulsion in an acceptable oil) or ion exchange resins, and sparingly soluble derivatives (such as, for example, a sparingly soluble salt).

[0970] Sustained-release matrices include polylactides (U.S. Pat. No. 3,773,919, EP 58,481), copolymers of L-glutamic acid and gamma-ethyl-L-glutamate (Sidman et al., Biopolymers 22:547-556 (1983)), poly (2-hydroxyethyl methacrylate) (Langer et al., J. Biomed. Mater. Res. 15:167-277 (1981), and Langer, Chem. Tech. 12:98-105 (1982)), ethylene vinyl acetate (Langer et al., Id.) or poly-D-(−)-3-hydroxybutyric acid (EP 133,988).

[0971] Sustained-release Therapeutics also include liposomally entrapped Therapeutics of the invention (see generally, Langer, Science 249:1527-1533 (1990); Treat et al., in Liposomes in the Therapy of Infectious Disease and Cancer, Lopez-Berestein and Fidler (eds.), Liss, New York, pp. 317-327 and 353-365, (1989)). Liposomes containing the Therapeutic are prepared by methods known per se: DE 3,218,121; Epstein et al., Proc. Natl. Acad. Sci. (USA) 82:3688-3692 (1985); Hwang et al., Proc. Natl. Acad. Sci.(USA) 77:4030-4034 (1980); EP 52,322; EP 36,676; EP 88,046; EP 143,949; EP 142,641; Japanese Pat. Appl. 83-118008; U.S. Pat. Nos. 4,485,045 and 4,544,545; and EP 102,324. Ordinarily, the liposomes are of the small (about 200-800 Angstroms) unilamellar type in which the lipid content is greater than about 30 mol. percent cholesterol, the selected proportion being adjusted for the optimal Therapeutic.

[0972] In yet an additional embodiment, the Therapeutics of the invention are delivered by way of a pump (see Langer, supra; Sefton, CRC Crit. Ref. Biomed. Eng. 14:201 (1987); Buchwald et al., Surgery 88:507 (1980); Saudek et al., N. Engl. J. Med. 321:574 (1989)).

[0973] Other controlled release systems are discussed in the review by Langer (Science 249:1527-1533 (1990)).

[0974] For parenteral administration, in one embodiment, the Therapeutic is formulated generally by mixing it at the desired degree of purity, in a unit dosage injectable form (solution, suspension, or emulsion), with a pharmaceutically acceptable carrier, i.e., one that is non-toxic to recipients at the dosages and concentrations employed and is compatible with other ingredients of the formulation. For example, the formulation preferably does not include oxidizing agents and other compounds that are known to be deleterious to the Therapeutic.

[0975] Generally, the formulations are prepared by contacting the Therapeutic uniformly and intimately with liquid carriers or finely divided solid carriers or both. Then, if necessary, the product is shaped into the desired formulation. Preferably the carrier is a parenteral carrier, more preferably a solution that is isotonic with the blood of the recipient. Examples of such carrier vehicles include water, saline, Ringer's solution, and dextrose solution. Non-aqueous vehicles such as fixed oils and ethyl oleate are also useful herein, as well as liposomes.

[0976] The carrier suitably contains minor amounts of additives such as substances that enhance isotonicity and chemical stability. Such materials are non-toxic to recipients at the dosages and concentrations employed, and include buffers such as phosphate, citrate, succinate, acetic acid, and other organic acids or their salts; antioxidants such as ascorbic acid; low molecular weight (less than about ten residues) polypeptides, e.g., polyarginine or tripeptides; proteins, such as serum albumin, gelatin, or immunoglobulins; hydrophilic polymers such as polyvinylpyrrolidone; amino acids, such as glycine, glutamic acid, aspartic acid, or arginine; monosaccharides, disaccharides, and other carbohydrates including cellulose or its derivatives, glucose, manose, or dextrins; chelating agents such as EDTA; sugar alcohols such as mannitol or sorbitol; counterions such as sodium; and/or nonionic surfactants such as polysorbates, poloxamers, or PEG.

[0977] The Therapeutic is typically formulated in such vehicles at a concentration of about 0.1 mg/ml to 100 mg/ml, preferably 1-10 mg/ml, at a pH of about 3 to 8. It will be understood that the use of certain of the foregoing excipients, carriers, or stabilizers will result in the formation of polypeptide salts.

[0978] Any pharmaceutical used for therapeutic administration can be sterile. Sterility is readily accomplished by filtration through sterile filtration membranes (e.g., 0.2 micron membranes). Therapeutics generally are placed into a container having a sterile access port, for example, an intravenous solution bag or vial having a stopper pierceable by a hypodermic injection needle.

[0979] Therapeutics ordinarily will be stored in unit or multi-dose containers, for example, sealed ampoules or vials, as an aqueous solution or as a lyophilized formulation for reconstitution. As an example of a lyophilized formulation, 1 0-ml vials are filled with 5 ml of sterile-filtered 1% (w/v) aqueous Therapeutic solution, and the resulting mixture is lyophilized. The infusion solution is prepared by reconstituting the lyophilized Therapeutic using bacteriostatic Water-for-Injection.

[0980] The invention also provides a pharmaceutical pack or kit comprising one or more containers filled with one or more of the ingredients of the Therapeutics of the invention. Associated with such container(s) can be a notice in the form prescribed by a governmental agency regulating the manufacture, use or sale of pharmaceuticals or biological products, which notice reflects approval by the agency of manufacture, use or sale for human administration. In addition, the Therapeutics may be employed in conjunction with other therapeutic compounds.

[0981] The Therapeutics of the invention may be administered alone or in combination with adjuvants. Adjuvants that may be administered with the Therapeutics of the invention include, but are not limited to, alum, alum plus deoxycholate (ImmunoAg), MTP-PE (Biocine Corp.), QS21 (Genentech, Inc.), BCG (e.g., THERACYS®), MPL and nonviable prepartions of Corynebacterium parvum. In a specific embodiment, Therapeutics of the invention are administered in combination with alum. In another specific embodiment, Therapeutics of the invention are administered in combination with QS-2 1. Further adjuvants that may be administered with the Therapeutics of the invention include, but are not limited to, Monophosphoryl lipid immunomodulator, AdjuVax 100a, QS-21, QS-18, CRL1005, Aluminum salts, MF-59, and Virosomal adjuvant technology. Vaccines that may be administered with the Therapeutics of the invention include, but are not limited to, vaccines directed toward protection against MMR (measles, mumps, rubella), polio, varicella, tetanus/diptheria, hepatitis A, hepatitis B, haemophilus influenzae B, whooping cough, pneumonia, influenza, Lyme's Disease, rotavirus, cholera, yellow fever, Japanese encephalitis, poliomyelitis, rabies, typhoid fever, and pertussis. Combinations may be administered either concomitantly, e.g., as an admixture, separately but simultaneously or concurrently; or sequentially. This includes presentations in which the combined agents are administered together as a therapeutic mixture, and also procedures in which the combined agents are administered separately but simultaneously, e.g., as through separate intravenous lines into the same individual. Administration “in combination” further includes the separate administration of one of the compounds or agents given first, followed by the second.

[0982] The Therapeutics of the invention may be administered alone or in combination with other therapeutic agents. Therapeutic agents that may be administered in combination with the Therapeutics of the invention, include but not limited to, chemotherapeutic agents, antibiotics, steroidal and non-steroidal anti-inflammatories, conventional immunotherapeutic agents, and/or therapeutic treatments described below. Combinations may be administered either concomitantly, e.g., as an admixture, separately but simultaneously or concurrently; or sequentially. This includes presentations in which the combined agents are administered together as a therapeutic mixture, and also procedures in which the combined agents are administered separately but simultaneously, e.g., as through separate intravenous lines into the same individual. Administration “in combination” further includes the separate administration of one of the compounds or agents given first, followed by the second.

[0983] In one embodiment, the Therapeutics of the invention are administered in combination with an anticoagulant. Anticoagulants that may be administered with the compositions of the invention include, but are not limited to, heparin, low molecular weight heparin, warfarin sodium (e.g., COUMADIN®), dicumarol, 4-hydroxycoumarin, anisindione (e.g., MIRADON™), acenocoumarol (e.g., nicoumalone, SINTHROME™), indan-1,3-dione, phenprocoumon (e.g., MARCUMAR™), ethyl biscoumacetate (e.g., TROMEXAN™), and aspirin. In a specific embodiment, compositions of the invention are administered in combination with heparin and/or warfarin. In another specific embodiment, compositions of the invention are administered in combination with warfarin. In another specific embodiment, compositions of the invention are administered in combination with warfarin and aspirin. In another specific embodiment, compositions of the invention are administered in combination with heparin. In another specific embodiment, compositions of the invention are administered in combination with heparin and aspirin.

[0984] In another embodiment, the Therapeutics of the invention are administered in combination with thrombolytic drugs. Thrombolytic drugs that may be administered with the compositions of the invention include, but are not limited to, plasminogen, lys-plasminogen, alpha2-antiplasmin, streptokinae (e.g., KABIKINASE™), antiresplace (e.g., EMINASE™), tissue plasminogen activator (t-PA, altevase, ACTIVASE™), urokinase (e.g., ABBOKINASE™), sauruplase, (Prourokinase, single chain urokinase), and aminocaproic acid (e.g., AMICAR™). In a specific embodiment, compositions of the invention are administered in combination with tissue plasminogen activator and aspirin.

[0985] In another embodiment, the Therapeutics of the invention are administered in combination with antiplatelet drugs. Antiplatelet drugs that may be administered with the compositions of the invention include, but are not limited to, aspirin, dipyridamole (e.g., PERSANTINE™), and ticlopidine (e.g., TICLID™).

[0986] In specific embodiments, the use of anti-coagulants, thrombolytic and/or antiplatelet drugs in combination with Therapeutics of the invention is contemplated for the prevention, diagnosis, and/or treatment of thrombosis, arterial thrombosis, venous thrombosis, thromboembolism, pulmonary embolism, atherosclerosis, myocardial infarction, transient ischemic attack, unstable angina. In specific embodiments, the use of anticoagulants, thrombolytic drugs and/or antiplatelet drugs <in combination with Therapeutics of the invention is contemplated for the prevention of occulsion of saphenous grafts, for reducing the risk of periprocedural thrombosis as might accompany angioplasty procedures, for reducing the risk of stroke in patients with atrial fibrillation including nonrheumatic atrial fibrillation, for reducing the risk of embolism associated with mechanical heart valves and or mitral valves disease. Other uses for the therapeutics of the invention, alone or in combination with antiplatelet, anticoagulant, and/or thrombolytic drugs, include, but are not limited to, the prevention of occlusions in extracorporeal devices (e.g., intravascular canulas, vascular access shunts in hemodialysis patients, hemodialysis machines, and cardiopulmonary bypass machines).

[0987] In certain embodiments, Therapeutics of the invention are administered in combination with antiretroviral agents, nucleoside/nucleotide reverse transcriptase inhibitors (NRTIs), non-nucleoside reverse transcriptase inhibitors (NNRTIs), and/or protease inhibitors (PIs). NRTIs that may be administered in combination with the Therapeutics of the invention, include, but are not limited to, RETROVIR™ (zidovudine/AZT), VIDEX™ (didanosine/ddI), HIVID™ (zalcitabine/ddC), ZERIT™ (stavudine/d4T), EPIVIR™ (lamivudine/3TC), and COMBIVIR™ (zidovudine/lamivudine). NNRTIs that may be administered in combination with the Therapeutics of the invention, include, but are not limited to, VIRAMUNE™ (nevirapine), RESCRIPTOR™ (delavirdine), and SUSTIVA™ (efavirenz). Protease inhibitors that may be administered in combination with the Therapeutics of the invention, include, but are not limited to, CRIXIVAN™ (indinavir), NORVIR™ (ritonavir), INVIRASE™ (saquinavir), and VIRACEPT™ (nelfinavir). In a specific embodiment, antiretroviral agents, nucleoside reverse transcriptase inhibitors, non-nucleoside reverse transcriptase inhibitors, and/or protease inhibitors may be used in any combination with Therapeutics of the invention to treat AIDS and/or to prevent or treat HIV infection.

[0988] Additional NRTIs include LODENOSINE™ (F-ddA; an acid-stable adenosine NRTI; Triangle/Abbott; COVIRACIL™ (emtricitabine/FTC; structurally related to lamivudine (3TC) but with 3- to 10-fold greater activity in vitro; Triangle/Abbott); dOTC (BCH-10652, also structurally related to lamivudine but retains activity against a substantial proportion of lamivudine-resistant isolates; Biochem Pharma); Adefovir (refused approval for anti-HIV therapy by FDA; Gilead Sciences); PREVEON® (Adefovir Dipivoxil, the active prodrug of adefovir; its active form is PMEA-pp); TENOFOVIR™ (bis-POC PMPA, a PMPA prodrug; Gilead); DAPD/DXG (active metabolite of DAPD; Triangle/Abbott); D-D4FC (related to 3TC, with activity against AZT/3TC-resistant virus); GW420867X (Glaxo Wellcome); ZIAGEN™ (abacavir/159U89; Glaxo Wellcome Inc.); CS-87 (3′azido-2′,3′-dideoxyuridine; WO 99/66936); and S-acyl-2-thioethyl (SATE)-bearing prodrug forms of β-L-FD4C and β-L-FddC (WO 98/17281).

[0989] Additional NNRTIs include COACTINON™ (Emivirine/MKC-442, potent NNRTI of the HEPT class; Triangle/Abbott); CAPRAVIRINE™ (AG-1 549/S-1 153, a next generation NNRTI with activity against viruses containing the K103N mutation; Agouron); PNU-142721 (has 20- to 50-fold greater activity than its predecessor delavirdine and is active against K103N mutants; Pharmacia & Upjohn); DPC-961 and DPC-963 (second-generation derivatives of efavirenz, designed to be active against viruses with the K103N mutation; DuPont); GW-420867X (has 25-fold greater activity than HBY097 and is active against K103N mutants; Glaxo Wellcome); CALANOLIDE A (naturally occurring agent from the latex tree; active against viruses containing either or both the Y 181 C and Ki 03N mutations); and Propolis (WO 99/49830).

[0990] Additional protease inhibitors include LOPINAVIR™ (ABT378/r; Abbott Laboratories); BMS-232632 (an azapeptide; Bristol-Myres Squibb); TIPRANAVIR™ (PNU-140690, a non-peptic dihydropyrone; Pharmacia & Upjohn); PD-178390 (a nonpeptidic dihydropyrone; Parke-Davis); BMS 232632 (an azapeptide; Bristol-Myers Squibb); L-756,423 (an indinavir analog; Merck); DMP-450 (a cyclic urea compound; Avid & DuPont); AG-1776 (a peptidomimetic with in vitro activity against protease inhibitor-resistant viruses; Agouron); VX-175/GW-433908 (phosphate prodrug of amprenavir; Vertex & Glaxo Welcome); CGP61755 (Ciba); and AGENERASE™ (amprenavir; Glaxo Wellcome Inc.).

[0991] Additional antiretroviral agents include fusion inhibitors/gp41 binders. Fusion inhibitors/gp41 binders include T-20 (a peptide from residues 643-678 of the HIV gp4l transmembrane protein ectodomain which binds to gp4l in its resting state and prevents transformation to the fusogenic state; Trimeris) and T-1249 (a second-generation fusion inhibitor; Trimeris).

[0992] Additional antiretroviral agents include fusion inhibitors/chemokine receptor antagonists. Fusion inhibitors/chemokine receptor antagonists include CXCR4 antagonists such as AMD 3100 (a bicyclam), SDF-1 and its analogs, and ALX40-4C (a cationic peptide), T22 (an 18 amino acid peptide; Trimeris) and the T22 analogs T134 and T140; CCR5 antagonists such as RANTES (9-68), AOP-RANTES, NNY-RANTES, and TAK-779; and-CCR5/CXCR4 antagonists such as NSC 651016 (a distamycin analog). Also included are CCR2B, CCR3, and CCR6 antagonists. Chemokine recpetor agonists such as RANTES, SDF-1, MIP-1α, MIP-1β, etc., may also inhibit fusion.

[0993] Additional antiretroviral agents include integrase inhibitors. Integrase inhibitors include dicaffeoylquinic (DFQA) acids; L-chicoric acid (a dicaffeoyltartaric (DCTA) acid); quinalizarin (QLC) and related anthraquinones; ZINTEVIR™ (AR 177, an oligonucleotide that probably acts at cell surface rather than being a true integrase inhibitor; Arondex); and naphthols such as those disclosed in WO 98/50347.

[0994] Additional antiretroviral agents include hydroxyurea-like compunds such as BCX-34 (a purine nucleoside phosphorylase inhibitor; Biocryst); ribonucleotide reductase inhibitors such as DIDOX™ (Molecules for Health); inosine monophosphate dehydrogenase (IMPDH) inhibitors sucha as VX-497 (Vertex); and mycopholic acids such as CellCept (mycophenolate mofetil; Roche).

[0995] Additional antiretroviral agents include inhibitors of viral integrase, inhibitors of viral genome nuclear translocation such as arylene bis(methylketone) compounds; inhibitors of HIV entry such as AOP-RANTES, NNY-RANTES, RANTES-IgG fusion protein, soluble complexes of RANTES and glycosaminoglycans (GAG), and AMD-3 100; nucleocapsid zinc finger inhibitors such as dithiane compounds; targets of HIV Tat and Rev; and pharmacoenhancers such as ABT-378.

[0996] Other antiretroviral therapies and adjunct therapies include cytokines and lymphokines such as MIP-1α, MIP-1β, SDF-1α, IL-2, PROLEUKIN™ (aldesleukin/L2-7001; Chiron), IL-4, IL-10, IL-12, and IL-13; interferons such as IFN-α2a; antagonists of TNFs, NFKB, GM-CSF, M-CSF, and IL-10; agents that modulate immune activation such as cyclosporin and prednisone; vaccines such as Remune™ (HIV Immunogen), APL 400-003 (Apollon), recombinant gp120 and fragments, bivalent (B/E) recombinant envelope glycoprotein, rgp120CM235, MN rgp120, SF-2 rgp120, gp120/soluble CD4 complex, Delta JR-FL protein, branched synthetic peptide derived from discontinuous gp120 C3/C4 domain, fusion-competent immunogens, and Gag, Pol, Nef, and Tat vaccines; gene-based therapies such as genetic suppressor elements (GSEs; WO 98/54366), and intrakines (genetically modified CC chemokines targetted to the ER to block surface expression of newly synthesized CCR5 (Yang et al., PNAS 94:11567-72 (1997); Chen et al., Nat. Med. 3:1110-16 (1997)); antibodies such as the anti-CXCR4 antibody 12G5, the anti-CCR5 antibodies 2D7, 5C7, PA8, PA9, PA10, PA11, PA12, and PA14, the anti-CD4 antibodies Q4120 and RPA-T4, the anti-CCR3 antibody 7B11, the anti-gp120 antibodies 17b, 48d, 447-52D, 257-D, 268-D and 50.1, anti-Tat antibodies, anti-TNF-α antibodies, and monoclonal antibody 33A; aryl hydrocarbon (AH) receptor agonists and antagonists such as TCDD, 3,3′,4,4′,5-pentachlorobiphenyl, 3,3′,4,4′-tetrachlorobiphenyl, and α-naphthoflavone (WO 98/30213); and antioxidants such as y-L-glutamyl-L-cysteine ethyl ester (γ-GCE; WO 99/56764).

[0997] In a further embodiment, the Therapeutics of the invention are administered in combination with an antiviral agent. Antiviral agents that may be administered with the Therapeutics of the invention include, but are not limited to, acyclovir, ribavirin, amantadine, and remantidine.

[0998] In other embodiments, Therapeutics of the invention may be administered in combination with anti-opportunistic infection agents. Anti-opportunistic agents that may be administered in combination with the Therapeutics of the invention, include, but are not limited to, TRIMETHOPRIM-SULFAMETHOXAZOLE™, DAPSONE™, PENTAMIDINE™, ATOVAQUONE™, ISONIAZID™, RIFAMPIN™, PYRAZINAMIDE™, ETHAMBUTOL™, RIFABUTIN™, CLARITHROMYCIN™, AZITHROMYCIN™, GANCICLOVIR™, FOSCARNET™, CIDOFOVIR™, FLUCONAZOLE™, ITRACONAZOLE™, KETOCONAZOLE™, ACYCLOVIR™, FAMCICOLVIR™, PYRIMETHAMINE™, LEUCOVORIN™, NEUPOGEN™ (filgrastim/G-CSF), and LEUKINE™ (sargramostim/GM-CSF). In a specific embodiment, Therapeutics of the invention are used in any combination with TRIMETHOPRIM-SULFAMETHOXAZOLE™, DAPSONE™, PENTAMIDINE™, and/or ATOVAQUONE™ to prophylactically treat or prevent an opportunistic Pneumocystis carinii pneumonia infection. In another specific embodiment, Therapeutics of the invention are used in any combination with ISONIAZID™, RIFAMPIN™, PYRAZINAMIDE™, and/or ETHAMBUTOL™ to prophylactically treat or prevent an opportunistic Mycobacterium avium complex infection. In another specific embodiment, Therapeutics of the invention are used in any combination with RIFABUTIN™, CLARITHROMYCIN™, and/or AZITHROMYCIN™ to prophylactically treat or prevent an opportunistic Mycobacterium tuberculosis infection. In another specific embodiment, Therapeutics of the invention are used in any combination with GANCICLOVIR™, FOSCARNET™, and/or CIDOFOVIR™ to prophylactically treat or prevent an opportunistic cytomegalovirus infection. In another specific embodiment, Therapeutics of the invention are used in any combination with FLUCONAZOLE™, ITRACONAZOLE™, and/or KETOCONAZOLE™ to prophylactically treat or prevent an opportunistic fungal infection. In another specific embodiment, Therapeutics of the invention are used in any combination with ACYCLOVIR™ and/or FAMCICOLVIR™ to prophylactically treat or prevent an opportunistic herpes simplex virus type I and/or type II infection. In another specific embodiment, Therapeutics of the invention are used in any combination with PYRIMETHAMINE™ and/or LEUCOVORIN™ to prophylactically treat or prevent an opportunistic Toxoplasma gondii infection. In another specific embodiment, Therapeutics of the invention are used in any combination with LEUCOVORIN™ and/or NEUPOGEN™ to prophylactically treat or prevent an opportunistic bacterial infection.

[0999] In a further embodiment, the Therapeutics of the invention are administered in combination with an antibiotic agent. Antibiotic agents that may be administered with the Therapeutics of the invention include, but are not limited to, amoxicillin, beta-lactamases, aminoglycosides, beta-lactam (glycopeptide), beta-lactamases, Clindamycin, chloramphenicol, cephalosporins, ciprofloxacin, erythromycin, fluoroquinolones, macrolides, metronidazole, penicillins, quinolones, rapamycin, rifampin, streptomycin, sulfonamide, tetracyclines, trimethoprim, trimethoprim-sulfamethoxazole, and vancomycin.

[1000] In other embodiments, the Therapeutics of the invention are administered in combination with immunestimulants. Immunostimulants that may be administered in combination with the Therapeutics of the invention include, but are not limited to, levamisole (e.g., ERGAMISOL™), isoprinosine (e.g. INOSIPLEX™), interferons (e.g. interferon alpha), and interleukins (e.g., IL-2).

[1001] In other embodiments, Therapeutics of the invention are administered in combination with immunosuppressive agents. Immunosuppressive agents that may be administered in combination with the Therapeutics of the invention include, but are not limited to, steroids, cyclosporine, cyclosporine analogs, cyclophosphamide methylprednisone, prednisone, azathioprine, FK-506, 15-deoxyspergualin, and other immunosuppressive agents that act by suppressing the function of responding T cells. Other immunosuppressive agents that may be administered in combination with the Therapeutics of the invention include, but are not limited to, prednisolone, methotrexate, thalidomide, methoxsalen, rapamycin, leflunomide, mizoribine (BREDININ™), brequinar, deoxyspergualin, and azaspirane (SKF 105685), ORTHOCLONE OKT® 3 (muromonab-CD3), SANDIMMUNE™, NEORAL™, SANGDYA™ (cyclosporine), PROGRAF® (FK506, tacrolimus), CELLCEPT® (mycophenolate motefil, of which the active metabolite is mycophenolic acid), IMURAN™ (azathioprine), glucocorticosteroids, adrenocortical steroids such as DELTASONE™ (prednisone) and HYDELTRASOL™ (prednisolone), FOLEX™ and MEXATE™ (methotrxate), OXSORALEN-ULTRA™ (methoxsalen) and RAPAMUNE™ (sirolimus). In a specific embodiment, immunosuppressants may be used to prevent rejection of organ or bone marrow transplantation.

[1002] In an additional embodiment, Therapeutics of the invention are administered alone or in combination with one or more intravenous immune globulin preparations. Intravenous immune globulin preparations that may be administered with the Therapeutics of the invention include, but not limited to, GAMMAR™, IVEEGAM™, SANDOGLOBULIN™, GAMMAGARD S/D™, ATGAM™ (antithymocyte glubulin), and GAMIMUNE™. In a specific embodiment, Therapeutics of the invention are administered in combination with intravenous immune globulin preparations in transplantation therapy (e.g., bone marrow transplant).

[1003] In certain embodiments, the Therapeutics of the invention are administered alone or in combination with an anti-inflammatory agent. Anti-inflammatory agents that may be administered with the Therapeutics of the invention include, but are not limited to, corticosteroids (e.g. betamethasone, budesonide, cortisone, dexamethasone, hydrocortisone, methylprednisolone, prednisolone, prednisone, and triamcinolone), nonsteroidal anti-inflammatory drugs (e.g., diclofenac, diflunisal, etodolac, fenoprofen, floctafenine, flurbiprofen, ibuprofen, indomethacin, ketoprofen, meclofenamate, mefenamic acid, meloxicam, nabumetone, naproxen, oxaprozin, phenylbutazone, piroxicam, sulindac, tenoxicam, tiaprofenic acid, and tolmetin.), as well as antihistamines, aminoarylcarboxylic acid derivatives, arylacetic acid derivatives, arylbutyric acid derivatives, arylcarboxylic acids, arylpropionic acid derivatives, pyrazoles, pyrazolones, salicylic acid derivatives, thiazinecarboxamides, e-acetamidocaproic acid, S-adenosylmethionine, 3-amino-4-hydroxybutyric acid, amixetrine, bendazac, benzydamine, bucolome, difenpiramide, ditazol, emorfazone, guaiazulene, nabumetone, nimesulide, orgotein, oxaceprol, paranyline, perisoxal, pifoxime, proquazone, proxazole, and tenidap.

[1004] In an additional embodiment, the compositions of the invention are administered alone or in combination with an anti-angiogenic agent. Anti-angiogenic agents that may be administered with the compositions of the invention include, but are not limited to, Angiostatin (Entremed, Rockville, Md.), Troponin-1 (Boston Life Sciences, Boston, Mass.), anti-Invasive Factor, retinoic acid and derivatives thereof, paclitaxel (Taxol), Suramin, Tissue Inhibitor of Metalloproteinase-1, Tissue Inhibitor of Metalloproteinase-2, VEGI, Plasminogen Activator Inhibitor-1, Plasminogen Activator Inhibitor-2, and various forms of the lighter “d group” transition metals.

[1005] Lighter “d group” transition metals include, for example, vanadium, molybdenum, tungsten, titanium, niobium, and tantalum species. Such transition metal species may form transition metal complexes. Suitable complexes of the above-mentioned transition metal species include oxo transition metal complexes.

[1006] Representative examples of vanadium complexes include oxo vanadium complexes such as vanadate and vanadyl complexes. Suitable vanadate complexes include metavanadate and orthovanadate complexes such as, for example, ammonium metavanadate, sodium metavanadate, and sodium orthovanadate. Suitable vanadyl complexes include, for example, vanadyl acetylacetonate and vanadyl sulfate including vanadyl sulfate hydrates such as vanadyl sulfate mono- and trihydrates.

[1007] Representative examples of tungsten and molybdenum complexes also include oxo complexes. Suitable oxo tungsten complexes include tungstate and tungsten oxide complexes. Suitable tungstate complexes include ammonium tungstate, calcium tungstate, sodium tungstate dihydrate, and tungstic acid. Suitable tungsten oxides include tungsten (IV) oxide and tungsten (VI) oxide. Suitable oxo molybdenum complexes include molybdate, molybdenum oxide, and molybdenyl complexes. Suitable molybdate complexes include ammonium molybdate and its hydrates, sodium molybdate and its hydrates, and potassium molybdate and its hydrates. Suitable molybdenum oxides include molybdenum (VI) oxide, molybdenum (VI) oxide, and molybdic acid. Suitable molybdenyl complexes include, for example, molybdenyl acetylacetonate. Other suitable tungsten and molybdenum complexes include hydroxo derivatives derived from, for example, glycerol, tartaric acid, and sugars.

[1008] A wide variety of other anti-angiogenic factors may also be utilized within the context of the present invention. Representative examples include, but are not limited to, platelet factor 4; protamine sulphate; sulphated chitin derivatives (prepared from queen crab shells), (Murata et al., Cancer Res. 51:22-26, (1991)); Sulphated Polysaccharide Peptidoglycan Complex (SP-PG) (the function of this compound may be enhanced by the presence of steroids such as estrogen, and tamoxifen citrate); Staurosporine; modulators of matrix metabolism, including for example, proline analogs, cishydroxyproline, d,L-3,4-dehydroproline, Thiaproline, alpha,alpha-dipyridyl, aminopropionitrile fumarate; 4-propyl -5-(4-pyridinyl)-2(3H)-oxazolone; Methotrexate; Mitoxantrone; Heparin; Interferons; 2 Macroglobulin-serum; ChIMP-3 (Pavloff et al., J. Bio. Chem. 267:17321-17326, (1992)); Chymostatin (Tomkinson et al., Biochem J. 286:475-480, (1992)); Cyclodextrin Tetradecasulfate; Eponemycin; Camptothecin; Fumagillin (Ingber et al., Nature 348:555-557, (1990)); Gold Sodium Thiomalate (“GST”; Matsubara and Ziff, J. Clin. Invest. 79:1440-1446, (1987)); anticollagenase-serum; alpha2-antiplasmin (Holmes et al., J. Biol. Chem. 262(4): 1659-1664, (1987)); Bisantrene (National Cancer Institute); Lobenzarit disodium (N-(2)-carboxyphenyl-4-chloroanthronilic acid disodium or “CCA”; (Takeuchi et al., Agents Actions 36:312-316, (1992)); and metalloproteinase inhibitors such as BB94.

[1009] Additional anti-angiogenic factors that may also be utilized within the context of the present invention include Thalidomide, (Celgene, Warren, N.J.); Angiostatic steroid; AGM-1470 (H. Brem and J. Folkman J Pediatr. Surg. 28:445-51 (1993)); an integrin alpha v beta 3 antagonist (C. Storgard et al., J Clin. Invest. 103:47-54 (1999)); carboxynaminolmidazole; Carboxyamidotriazole (CAI) (National Cancer Institute, Bethesda, Md.); Conbretastatin A-4 (CA4P) (OXiGENE, Boston, Mass.); Squalamine (Magainin Pharmaceuticals, Plymouth Meeting, Pa.); TNP-470, (Tap Pharmaceuticals, Deerfield, Ill.); ZD-0101 AstraZeneca (London, UK); APRA (CT2584); Benefin, Byrostatin-1 (SC339555); CGP-41251 (PKC 412); CM1O; Dexrazoxane (ICRF187); DMXAA; Endostatin; Flavopridiol; Genestein; GTE; ImmTher; Iressa (ZD1839); Octreotide (Somatostatin); Panretin; Penacillamine; Photopoint; PI-88; Prinomastat (AG-3340) Purlytin; Suradista (FCE26644); Tamoxifen (Nolvadex); Tazarotene; Tetrathiomolybdate; Xeloda (Capecitabine); and 5-Fluorouracil.

[1010] Anti-angiogenic agents that may be administed in combination with the compounds of the invention may work through a variety of mechanisms including, but not limited to, inhibiting proteolysis of the extracellular matrix, blocking the function of endothelial cell-extracellular matrix adhesion molecules, by antagonizing the function of angiogenesis inducers such as growth factors, and inhibiting integrin receptors expressed on proliferating endothelial cells. Examples of anti-angiogenic inhibitors that interfere with extracellular matrix proteolysis and which may be administered in combination with the compositons of the invention include, but are not lmited to, AG-3340 (Agouron, La Jolla, Calif.), BAY-12-9566 (Bayer, West Haven, Conn.), BMS-275291 (Bristol Myers Squibb, Princeton, N.J.), CGS-27032A (Novartis, East Hanover, N.J.), Marimastat (British Biotech, Oxford, UK), and Metastat (Aetema, St-Foy, Quebec). Examples of anti-angiogenic inhibitors that act by blocking the function of endothelial cell-extracellular matrix adhesion molecules and which may be administered in combination with the compositons of the invention include, but are not limited to, EMD-121974 (Merck KcgaA Darmstadt, Germany) and Vitaxin (Ixsys, La Jolla, Calif./Medimmune, Gaithersburg, Md.). Examples of anti-angiogenic agents that act by directly antagonizing or inhibiting angiogenesis inducers and which may be administered in combination with the compositons of the invention include, but are not lmited to, Angiozyme (Ribozyme, Boulder, Colo.), Anti-VEGF antibody (Genentech, S. San Francisco, Calif.), PTK-787/ZK-225846 (Novartis, Basel, Switzerland), SU-101 (Sugen, S. San Francisco, Calif.), SU-5416 (Sugen/ Pharmacia Upjohn, Bridgewater, NJ), and SU-6668 (Sugen). Other anti-angiogenic agents act to indirectly inhibit angiogenesis. Examples of indirect inhibitors of angiogenesis which may be administered in combination with the compositons of the invention include, but are not limited to, IM-862 (Cytran, Kirkland, Wash.), Interferon-alpha, IL-12 (Roche, Nutley, N.J.), and Pentosan polysulfate (Georgetown University, Washington, D.C.).

[1011] In particular embodiments, the use of compositions of the invention in combination with anti-angiogenic agents is contemplated for the treatment, prevention, and/or amelioration of an autoimmune disease, such as for example, an autoimmune disease described herein.

[1012] In a particular embodiment, the use of compositions of the invention in combination with anti-angiogenic agents is contemplated for the treatment, prevention, and/or amelioration of arthritis. In a more particular embodiment, the use of compositions of the invention in combination with anti-angiogenic agents is contemplated for the treatment, prevention, and/or amelioration of rheumatoid arthritis.

[1013] In another embodiment, the polynucleotides encoding a polypeptide of the present invention are administered in combination with an angiogenic protein, or polynucleotides encoding an angiogenic protein. Examples of angiogenic proteins that may be administered with the compositions of the invention include, but are not limited to, acidic and basic fibroblast growth factors, VEGF-1, VEGF-2, VEGF-3, epidermal growth factor alpha and beta, platelet-derived endothelial cell growth factor, platelet-derived growth factor, tumor necrosis factor alpha, hepatocyte growth factor, insulin-like growth factor, colony stimulating factor, macrophage colony stimulating factor, granulocyte/macrophage colony stimulating factor, and nitric oxide synthase.

[1014] In additional embodiments, compositions of the invention are administered in combination with a chemotherapeutic agent. Chemotherapeutic agents that may be administered with the Therapeutics of the invention include, but are not limited to alkylating agents such as nitrogen mustards (for example, Mechlorethamine, cyclophosphamide, Cyclophosphamide Ifosfamide, Melphalan (L-sarcolysin), and Chlorambucil), ethylenimines and methylmelamines (for example, Hexamethylmelamine and Thiotepa), alkyl sulfonates (for example, Busulfan), nitrosoureas (for example, Carmustine (BCNU), Lomustine (CCNU), Semustine (methyl-CCNU), and Streptozocin (streptozotocin)), triazenes (for example, Dacarbazine (DTIC; dimethyltriazenoimidazolecarboxamide)), folic acid analogs (for example, Methotrexate (amethopterin)), pyrimidine analogs (for example, Fluorouacil (5-fluorouracil; 5-FU), Floxuridine (fluorodeoxyuridine; FudR), and Cytarabine (cytosine arabinoside)), purine analogs and related inhibitors (for example, Mercaptopurine (6-mercaptopurine; 6-MP), Thioguanine (6-thioguanine; TG), and Pentostatin (2′-deoxycoformycin)), vinca alkaloids (for example, Vinblastine (VLB, vinblastine sulfate)) and Vincristine (vincristine sulfate)), epipodophyllotoxins (for example, Etoposide and Teniposide), antibiotics (for example, Dactinomycin (actinomycin D), Daunorubicin (daunomycin; rubidomycin), Doxorubicin, Bleomycin, Plicamycin (mithramycin), and Mitomycin (mitomycin C), enzymes (for example, L-Asparaginase), biological response modifiers (for example, Interferon-alpha and interferon-alpha-2b), platinum coordination compounds (for example, Cisplatin (cis-DDP) and Carboplatin), anthracenedione (Mitoxantrone), substituted ureas (for example, Hydroxyurea), methylhydrazine derivatives (for example, Procarbazine (N-methylhydrazine; MIH), adrenocorticosteroids (for example, Prednisone), progestins (for example, Hydroxyprogesterone caproate, Medroxyprogesterone, Medroxyprogesterone acetate, and Megestrol acetate), estrogens (for example, Diethylstilbestrol (DES), Diethylstilbestrol diphosphate, Estradiol, and Ethinyl estradiol), antiestrogens (for example, Tamoxifen), androgens (Testosterone proprionate, and Fluoxymesterone), antiandrogens (for example, Flutamide), gonadotropin-releasing horomone analogs (for example, Leuprolide), other hormones and hormone analogs (for example, methyltestosterone, estramustine, estramustine phosphate sodium, chlorotrianisene, and testolactone), and others (for example, dicarbazine, glutamic acid, and mitotane).

[1015] In one embodiment, the compositions of the invention are administered in combination with one or more of the following drugs: infliximab (also known as RemicadeTm Centocor, Inc.), Trocade (Roche, RO-32-3555), Leflunomide (also known as Arava™ from Hoechst Marion Roussel), Kineret™ (an IL-1 Receptor antagonist also known as Anakinra from Amgen, Inc.)

[1016] In a specific embodiment, compositions of the invention are administered in combination with CHOP (cyclophosphamide, doxorubicin, vincristine, and prednisone) or combination of one or more of the components of CHOP. In one embodiment, the compositions of the invention are administered in combination with anti-CD20 antibodies, human monoclonal anti-CD20 antibodies. In another embodiment, the compositions of the invention are administered in combination with anti-CD20 antibodies and CHOP, or anti-CD20 antibodies and any combination of one or more of the components of CHOP, particularly cyclophosphamide and/or prednisone. In a specific embodiment, compositions of the invention are administered in combination with Rituximab. In a further embodiment, compositions of the invention are administered with Rituximab and CHOP, or Rituximab and any combination of one or more of the components of CHOP, particularly cyclophosphamide and/or prednisone. In a specific embodiment, compositions of the invention are administered in combination with tositumomab. In a further embodiment, compositions of the invention are administered with tositumomab and CHOP, or tositumomab and any combination of one or more of the components of CHOP, particularly cyclophosphamide and/or prednisone. The anti-CD20 antibodies may optionally be associated with radioisotopes, toxins or cytotoxic prodrugs.

[1017] In another specific embodiment, the compositions of the invention are administered in combination Zevalin™. In a further embodiment, compositions of the invention are administered with Zevalin™ and CHOP, or Zevalin™ and any combination of one or more of the components of CHOP, particularly cyclophosphamide and/or prednisone. Zevalin™ may be associated with one or more radisotopes. Particularly preferred isotopes are ⁹⁰Y and ¹¹¹In.

[1018] In an additional embodiment, the Therapeutics of the invention are administered in combination with cytokines. Cytokines that may be administered with the Therapeutics of the invention include, but are not limited to, IL2, IL3, IL4, IL5, IL6, IL7, IL10, IL12, I-L13, IL15, anti-CD40, CD40L, IFN-gamma and TNF-alpha. In another embodiment, Therapeutics of the invention may be administered with any interleukin, including, but not limited to, IL-1alpha, IL-1beta, IL-2, IL-3, IL-4, IL-5, IL-6, IL-7, IL-8, IL-9, IL-10, IL-11, IL-12, IL-13, IL-14, IL-15, IL-16, IL-17, IL-1 8, IL-19, IL-20, and IL-21.

[1019] In one embodiment, the Therapeutics of the invention are administered in combination with members of the TNF family. TNF, TNF-related or TNF-like molecules that may be administered with the Therapeutics of the invention include, but are not limited to, soluble forms of TNF-alpha, lymphotoxin-alpha (LT-alpha, also known as TNF-beta), LT-beta (found in complex heterotrimer LT-alpha2-beta), OPGL, FasL, CD27L, CD30L, CD40L, 4-1BBL, DcR3, OX40L, TNF-gamma (International Publication No. WO 96/14328), AIM-I (International Publication No. WO 97/33899), endokine-alpha (International Publication No. WO 98/07880), OPG, and neutrokine-alpha (International Publication No. WO 98/18921, OX40, and nerve growth factor (NGF), and soluble forms of Fas, CD30, CD27, CD40 and 4-IBB, TR2 (International Publication No. WO 96/34095), DR3 (International Publication No. WO 97/33904), DR4 (International Publication No. WO 98/32856), TR5 (International Publication No. WO 98/30693), TRANK, TR9 (International Publication No. WO 98/56892),TR10 (International Publication No. WO 98/54202), 312C2 (International Publication No. WO 98/06842), and TR12, and soluble forms CD154, CD70, and CD153.

[1020] In an additional embodiment, the Therapeutics of the invention are administered in combination with angiogenic proteins. Angiogenic proteins that may be administered with the Therapeutics of the invention include, but are not limited to, Glioma Derived Growth Factor (GDGF), as disclosed in European Patent Number EP-399816; Platelet Derived Growth Factor-A (PDGF-A), as disclosed in European Patent Number EP-682110; Platelet Derived Growth Factor-B (PDGF-B), as disclosed in European Patent Number EP-282317; Placental Growth Factor (PlGF), as disclosed in International Publication Number WO 92/06194; Placental Growth Factor-2 (PlGF-2), as disclosed in Hauser et al., Growth Factors, 4:259-268 (1993); Vascular Endothelial Growth Factor (VEGF), as disclosed in International Publication Number WO 90/13649; Vascular Endothelial Growth Factor-A (VEGF-A), as disclosed in European Patent Number EP-506477; Vascular Endothelial Growth Factor-2 (VEGF-2), as disclosed in International Publication Number WO 96/39515; Vascular Endothelial Growth Factor B (VEGF-3); Vascular Endothelial Growth Factor B-186 (VEGF-B186), as disclosed in International Publication Number WO 96/26736; Vascular Endothelial Growth Factor-D (VEGF-D), as disclosed in International Publication Number WO 98/02543; Vascular Endothelial Growth Factor-D (VEGF-D), as disclosed in International Publication Number WO 98/07832; and Vascular Endothelial Growth Factor-E (VEGF-E), as disclosed in German Patent Number DE19639601. The above mentioned references are herein incorporated by reference in their entireties.

[1021] In an additional embodiment, the Therapeutics of the invention are administered in combination with Fibroblast Growth Factors. Fibroblast Growth Factors that may be administered with the Therapeutics of the invention include, but are not limited to, FGF-1, FGF-2, FGF-3, FGF-4, FGF-5, FGF-6, FGF-7, FGF-8, FGF-9, FGF-10, FGF-l 1, FGF-12, FGF-13, FGF-14, and FGF-15.

[1022] In an additional embodiment, the Therapeutics of the invention are administered in combination with hematopoietic growth factors. Hematopoietic growth factors that may be administered with the Therapeutics of the invention include, but are not limited to, granulocyte macrophage colony stimulating factor (GM-CSF) (sargramostim, LEUKINE™, PROKINE™), granulocyte colony stimulating factor (G-CSF) (filgrastim, NEUPOGEN™), macrophage colony stimulating factor (M-CSF, CSF-1) erythropoietin (epoetin alfa, EPOGEN™, PROCRIT™), stem cell factor (SCF, c-kit ligand, steel factor), megakaryocyte colony stimulating factor, PIXY321 (a GMCSF/IL-3 fusion protein), interleukins, especially any one or more of IL-1 through IL-12, interferon-gamma, or thrombopoietin.

[1023] In certain embodiments, Therapeutics of the present invention are administered in combination with adrenergic blockers, such as, for example, acebutolol, atenolol, betaxolol, bisoprolol, carteolol, labetalol, metoprolol, nadolol, oxprenolol, penbutolol, pindolol, propranolol, sotalol, and timolol.

[1024] In another embodiment, the Therapeutics of the invention are administered in combination with an antiarrhythmic drug (e.g., adenosine, amidoarone, bretylium, digitalis, digoxin, digitoxin, diliazem, disopyramide, esmolol, flecainide, lidocaine, mexiletine, moricizine, phenytoin, procainamide, N-acetyl procainamide, propafenone, propranolol, quinidine, sotalol, tocainide, and verapamil).

[1025] In another embodiment, the Therapeutics of the invention are administered in combination with diuretic agents, such as carbonic anhydrase-inhibiting agents (e.g., acetazolamide, dichlorphenamide, and methazolamide), osmotic diuretics (e.g., glycerin, isosorbide, mannitol, and urea), diuretics that inhibit Na⁺—K⁺—2Cl⁻ symport (e.g., furosemide, bumetanide, azosemide, piretanide, tripamide, ethacrynic acid, muzolimine, and torsemide), thiazide and thiazide-like diuretics (e.g., bendroflumethiazide, benzthiazide, chlorothiazide, hydrochlorothiazide, hydroflumethiazide, methyclothiazide, polythiazide, trichormethiazide, chlorthalidone, indapamide, metolazone, and quinethazone), potassium sparing diuretics (e.g., amiloride and triamterene), and mineralcorticoid receptor antagonists (e.g., spironolactone, canrenone, and potassium canrenoate).

[1026] In one embodiment, the Therapeutics of the invention are administered in combination with treatments for endocrine and/or hormone imbalance disorders. Treatments for endocrine and/or hormone imbalance disorders include, but are not limited to, ¹²⁷I, radioactive isotopes of iodine such as ¹³¹I and ¹²³I; recombinant growth hormone, such as HUMATROPE™ (recombinant somatropin); growth hormone analogs such as PROTROPIN™ (somatrem); dopamine agonists such as PARLODEL™ (bromocriptine); somatostatin analogs such as SANDOSTATIN™ (octreotide); gonadotropin preparations such as PREGNYL™, A.P.L.™ and PROFASI™ (chorionic gonadotropin (CG)), PERGONAL™ (menotropins), and METRODIN™ (urofollitropin (uFSH)); synthetic human gonadotropin releasing hormone preparations such as FACTREL™ and LUTREPULSE™ (gonadorelin hydrochloride); synthetic gonadotropin agonists such as LUPRON™ (leuprolide acetate), SUPPRELIN™ (histrelin acetate), SYNAREL™ (nafarelin acetate), and ZOLADEX™ (goserelin acetate); synthetic preparations of thyrotropin-releasing hormone such as RELEFACT TRH™ and THYPINONE™ (protirelin); recombinant human TSH such as THYROGEN™; synthetic preparations of the sodium salts of the natural isomers of thyroid hormones such as L-T₄™, SYNTHROID™ and LEVOTHROID™ (levothyroxine sodium), L-T₃™, CYTOMEL™ and TRIOSTAT™ (liothyroine sodium), and THYROLAR™ (liotrix); antithyroid compounds such as 6-n-propylthiouracil (propylthiouracil), 1-methyl-2-mercaptoimidazole and TAPAZOLE™ (methimazole), NEO-MERCAZOLE™ (carbimazole); beta-adrenergic receptor antagonists such as propranolol and esmolol; Ca²⁺ channel blockers; dexamethasone and iodinated radiological contrast agents such as TELEPAQUE™ (iopanoic acid) and ORAGRAFIN™ (sodium ipodate).

[1027] Additional treatments for endocrine and/or hormone imbalance disorders include, but are not limited to, estrogens or congugated estrogens such as ESTRACE™ (estradiol), ESTINYL™ (ethinyl estradiol), PREMARIN™, ESTRATAB™, ORTHO-EST™, OGEN™ and estropipate (estrone), ESTROVIS™ (quinestrol), ESTRADERM™ (estradiol), DELESTROGEN™ and VALERGEN™ (estradiol valerate), DEPO-ESTRADIOL CYPIONATE™ and ESTROJECT LA™ (estradiol cypionate); antiestrogens such as NOLVADEX™ (tamoxifen), SEROPHENE™ and CLOMID™ (clomiphene); progestins such as DURALUTIN™ (hydroxyprogesterone caproate), MPA™ and DEPO-PROVERA™ (medroxyprogesterone acetate), PROVERA™ and CYCRIN™ (MPA), MEGACE™ (megestrol acetate), NORLUTIN™ (norethindrone), and NORLUTATE™ and AYGESTIN™ (norethindrone acetate); progesterone implants such as NORPLANT SYSTEM™ (subdermal implants of norgestrel); antiprogestins such as RU 486™ (mifepristone); hormonal contraceptives such as ENOVID™ (norethynodrel plus mestranol), PROGESTASERT™ (intrauterine device that releases progesterone), LOESTRIN™, BREVICON™, MODICON™, GENORA™, NELONA™, NORINYL™, OVACON-35™ and OVACON-50™ (ethinyl estradiol/norethindrone), LEVLEN™, NORDETTE™, TRI-LEVLEN™ and TRIPHASIL-21™ (ethinyl estradiol/levonorgestrel) LO/OVRAL™ and OVRAL™ (ethinyl estradiol/norgestrel), DEMULEN™ (ethinyl estradiol/ethynodiol diacetate), NORINYL™, ORTHO-NOVUM™, NORETHIN™, GENORA™, and NELOVA™ (norethindrone/mestranol), DESOGEN™ and ORTHO-CEPT™ (ethinyl estradiol/desogestrel), ORTHO-CYCLEN™ and ORTHO-TRICYCLEN™ (ethinyl estradiol/norgestimate), MICRONOR™ and NOR-QD™ (norethindrone), and OVRETTE™ (norgestrel).

[1028] Additional treatments for endocrine and/or hormone imbalance disorders include, but are not limited to, testosterone esters such as methenolone acetate and testosterone undecanoate; parenteral and oral androgens such as TESTOJECT-50™ (testosterone), TESTEX™ (testosterone propionate), DELATESTRYL™ (testosterone enanthate), DEPO-TESTOSTERONE™ (testosterone cypionate), DANOCRINE™ (danazol), HALOTESTIN™ (fluoxymesterone), ORETON METHYL™, TESTRED™ and VIRILON™ (methyltestosterone), and OXANDRIN™ (oxandrolone); testosterone transdermal systems such as, TESTODERM™; androgen receptor antagonist and 5-alpha-reductase inhibitors such as ANDROCUR™ (cyproterone acetate), EULEXIN™ (flutamide), and PROSCAR™ (finasteride); adrenocorticotropic hormone preparations such as CORTROSYN™ (cosyntropin); adrenocortical steroids and their synthetic analogs such as ACLOVATE™ (alclometasone dipropionate), CYCLOCORT™ (amcinonide), BECLOVENT™ and VANCERIL™ (beclomethasone dipropionate), CELESTONE™ (betamethasone), BENISONE™ and UTICORT™ (betamethasone benzoate), DIPROSONE™ (betamethasone dipropionate), CELESTONE PHOSPHATE™ (betamethasone sodium phosphate), CELESTONE SOLUSPAN™ (betamethasone sodium phosphate and acetate), BETA-VAL™ and VALISONE™ (betamethasone valerate), TEMOVATE™ (clobetasol propionate), CLODERM™ (clocortolone pivalate), CORTEF™ and HYDROCORTONE™ (cortisol (hydrocortisone)), HYDROCORTONE ACETATE™ (cortisol (hydrocortisone) acetate), LOCOID™ (cortisol (hydrocortisone) butyrate), HYDROCORTONE PHOSPHATE™ (cortisol (hydrocortisone) sodium phosphate), A-HYDROCORT™ and SOLU CORTEF™ (cortisol (hydrocortisone) sodium succinate), WESTCOR™ (cortisol (hydrocortisone) valerate), CORTISONE ACETATE™ (cortisone acetate), DESOWEN™ and TRIDESILON™ (desonide), TOPICORT™ (desoximetasone), DECADRON™ (dexamethasone), DECADRON LA™ (dexamethasone acetate), DECADRON PHOSPHATE™ and HEXADROL PHOSPHATE™ (dexamethasone sodium phosphate), FLORONE™ and MAXIFLOR™ (diflorasone di-acetate), FLORINEF ACETATE™ (fludrocortisone acetate), AEROBID™ and NASALIDE™ (flunisolide), FLUONID™ and SYNALAR™ (fluocinolone acetonide), LIDEX™ (fluocinonide), FLUOR-OP™ and FML™ (fluorometholone), CORDRAN™ (flurandrenolide), HALOG™ (halcinonide), HMS LIZUIFILM™ (medrysone), MEDROL™ (methylprednisolone), DEPO-MEDROL™ and MEDROL ACETATE™ (methylprednisone acetate), A-METHAPRED™ and SOLUMEDROL™ (methylprednisolone sodium succinate), ELOCON™ (mometasone furoate), HALDRONE™ (paramethasone acetate), DELTA-CORTEF™ (prednisolone), ECONOPRED™ (prednisolone acetate), HYDELTRASOL™ (prednisolone sodium phosphate), HYDELTRA-T.B.A™ (prednisolone tebutate), DELTASONE™ (prednisone), ARISTOCORT™ and KENACORT™ (triamcinolone), KENALOG™ (triamcinolone acetonide), ARISTOCORT™ and KENACORT DIACETATE™ (triamcinolone diacetate), and ARISTOSPAN™ (triamcinolone hexacetonide); inhibitors of biosynthesis and action of adrenocortical steroids such as CYTADREN™ (aminoglutethimide), NIZORAL™ (ketoconazole), MODRASTANE™ (trilostane), and METOPIRONE™ (metyrapone); bovine, porcine or human insulin or mixtures thereof; insulin analogs; recombinant human insulin such as HUMULIN™ and NOVOLIN™; oral hypoglycemic agents such as ORAMIDE™ and ORINASE™ (tolbutamide), DIABINESE™ (chlorpropamide), TOLAMIDE™ and TOLINASE™ (tolazamide), DYMELOR™ (acetohexamide), glibenclamide, MICRONASE™, DIBETA™ and GLYNASE™ (glyburide), GLUCOTROL™ (glipizide), and DIAMICRON™ (gliclazide), GLUCOPHAGE™ (metformin), ciglitazone, pioglitazone, and alpha-glucosidase inhibitors; bovine or porcine glucagon; somatostatins such as SANDOSTATIN™ (octreotide); and diazoxides such as PROGLYCEM™ (diazoxide).

[1029] In one embodiment, the Therapeutics of the invention are administered in combination with treatments for uterine motility disorders. Treatments for uterine motility disorders include, but are not limited to, estrogen drugs such as conjugated estrogens (e.g., PREMARIN® and ESTRATAB®), estradiols (e.g., CLIMARA® and ALORA®), estropipate, and chlorotrianisene; progestin drugs (e.g., AMEN® (medroxyprogesterone), MICRONOR® (norethidrone acetate), PROMETRIUM® progesterone, and megestrol acetate); and estrogen/progesterone combination therapies such as, for example, conjugated estrogens/medroxyprogesterone (e.g., PREMPRO™ and PREMPHASE®) and norethindrone acetate/ethinyl estsradiol (e.g., FEMHRT™).

[1030] In an additional embodiment, the Therapeutics of the invention are administered in combination with drugs effective in treating iron deficiency and hypochromic anemias, including but not limited to, ferrous sulfate (iron sulfate, FEOSOL™), ferrous fumarate (e.g., FEOSTAT™), ferrous gluconate (e.g., FERGON™), polysaccharide-iron complex (e.g., NIFEREX™), iron dextran injection (e.g., INFED™), cupric sulfate, pyroxidine, riboflavin, Vitamin B₁₂, cyancobalamin injection (e.g., REDISOL™, RUBRAMIN PC™), hydroxocobalamin, folic acid (e.g., FOLVITE™), leucovorin (folinic acid, 5-CHOH4PteGlu, citrovorum factor) or WELLCOVORIN (Calcium salt of leucovorin), transferrin or ferritin.

[1031] In certain embodiments, the Therapeutics of the invention are administered in combination with agents used to treat psychiatric disorders. Psychiatric drugs that may be administered with the Therapeutics of the invention include, but are not limited to, antipsychotic agents (e.g., chlorpromazine, chlorprothixene, clozapine, fluphenazine, haloperidol, loxapine, mesoridazine, molindone, olanzapine, perphenazine, pimozide, quetiapine, risperidone, thioridazine, thiothixene, trifluoperazine, and triflupromazine), antimanic agents (e.g., carbamazepine, divalproex sodium, lithium carbonate, and lithium citrate), antidepressants (e.g., amitriptyline, amoxapine, bupropion, citalopram, clomipramine, desipramine, doxepin, fluvoxamine, fluoxetine, imipramine, isocarboxazid, maprotiline, mirtazapine, nefazodone, nortriptyline, paroxetine, phenelzine, protriptyline, sertraline, tranylcypromine, trazodone, trimipramine, and venlafaxine), antianxiety agents (e.g., alprazolam, buspirone, chlordiazepoxide, clorazepate, diazepam, halazepam, lorazepam, oxazepam, and prazepam), and stimulants (e.g., d-amphetamine, methylphenidate, and pemoline).

[1032] In other embodiments, the Therapeutics of the invention are administered in combination with agents used to treat neurological disorders. Neurological agents that may be administered with the Therapeutics of the invention include, but are not limited to, antiepileptic agents (e.g., carbamazepine, clonazepam, ethosuximide, phenobarbital, phenytoin, primidone, valproic acid, divalproex sodium, felbamate, gabapentin, lamotrigine, levetiracetam, oxcarbazepine, tiagabine, topiramate, zonisamide, diazepam, lorazepam, and clonazepam), antiparkinsonian agents (e.g., levodopa/carbidopa, selegiline, amantidine, bromocriptine, pergolide, ropinirole, pramipexole, benztropine; biperiden; ethopropazine; procyclidine; trihexyphenidyl, tolcapone), and ALS therapeutics (e.g. riluzole).

[1033] In another embodiment, Therapeutics of the invention are administered in combination with vasodilating agents and/or calcium channel blocking agents. Vasodilating agents that may be administered with the Therapeutics of the invention include, but are not limited to, Angiotensin Converting Enzyme (ACE) inhibitors (e.g., papaverine, isoxsuprine, benazepril, captopril, cilazapril, enalapril, enalaprilat, fosinopril, lisinopril, moexipril, perindopril, quinapril, ramipril, spirapril, trandolapril, and nylidrin), and nitrates (e.g., isosorbide dinitrate, isosorbide mononitrate, and nitroglycerin). Examples of calcium channel blocking agents that may be administered in combination with the Therapeutics of the invention include, but are not limited to amlodipine, bepridil, diltiazem, felodipine, flunarizine, isradipine, nicardipine, nifedipine, nimodipine, and verapamil.

[1034] In certain embodiments, the Therapeutics of the invention are administered in combination with treatments for gastrointestinal disorders. Treatments for gastrointestinal, disorders that may be administered with the Therapeutic of the invention include, but are not limited to, H₂ histamine receptor antagonists (e.g., TAGAMET™ (cimetidine), ZANTAC™ (ranitidine), PEPCID™ (famotidine), and AXID™ (nizatidine)); inhibitors of H⁺, K⁺ATPase (e.g., PREVACID™ (lansoprazole) and PRILOSEC™ (omeprazole)); Bismuth compounds (e.g., PEPTO-BISMOL™ (bismuth subsalicylate) and DE-NOL™ (bismuth subcitrate)); various antacids; sucralfate; prostaglandin analogs (e.g. CYTOTEC™ (misoprostol)); muscarinic cholinergic antagonists; laxatives (e.g., surfactant laxatives, stimulant laxatives, saline and osmotic laxatives); antidiarrheal agents (e.g., LOMOTIL™ (diphenoxylate), MOTOFEN™ (diphenoxin), and IMODIUM™ (loperamide hydrochloride)), synthetic analogs of somatostatin such as SANDOSTATIN™ (octreotide), antiemetic agents (e.g., ZOFRAN™ (ondansetron), KYTRIL™ (granisetron hydrochloride), tropisetron, dolasetron, metoclopramide, chlorpromazine, perphenazine, prochlorperazine, promethazine, thiethylperazine, triflupromazine, domperidone, haloperidol, droperidol, trimethobenzamide, dexamethasone, methylprednisolone, dronabinol, and nabilone); D2 antagonists (e.g., metoclopramide, trimethobenzamide and chlorpromazine); bile salts; chenodeoxycholic acid; ursodeoxycholic acid; and pancreatic enzyme preparations such as pancreatin and pancrelipase.

[1035] In additional embodiments, the Therapeutics of the invention are administered in combination with other therapeutic or prophylactic regimens, such as, for example, radiation therapy.

### Example 14

### Method of Treating Decreased Levels of the Polypeptide

[1036] The present invention relates to a method for treating an individual in need of an increased level of a polypeptide of the invention in the body comprising administering to such an individual a composition comprising a therapeutically effective amount of an agonist of the invention (including polypeptides of the invention). Moreover, it will be appreciated that conditions caused by a decrease in the standard or normal expression level of a polypeptide of the present invention in an individual can be treated by administering the agonist or antagonist of the present invention. Thus, the invention also provides a method of treatment of an individual in need of an increased level of the polypeptide comprising administering to such an individual a Therapeutic comprising an amount of the agonist or antagonist to increase the activity level of the polypeptide in such an individual.

[1037] For example, a patient with decreased levels of a polypeptide receives a daily dose 0.1-100 ug/kg of the agonist or antagonist for six consecutive days. The exact details of the dosing scheme, based on administration and formulation, are provided in Example 13.

### Example 15

### Method of Treating Increased Levels of the Polypeptide

[1038] The present invention also relates to a method of treating an individual in need of a decreased level of a polypeptide of the invention in the body comprising administering to such an individual a composition comprising a therapeutically effective amount of an antagonist of the invention (including polypeptides and antibodies of the invention).

[1039] In one example, antisense technology is used to inhibit production of a polypeptide of the present invention. This technology is one example of a method of decreasing levels of a polypeptide, due to a variety of etiologies, such as cancer.

[1040] For example, a patient diagnosed with abnormally increased levels of a polypeptide is administered intravenously antisense polynucleotides at 0.5, 1.0, 1.5, 2.0 and 3.0 mg/kg day for 21 days. This treatment is repeated after a 7-day rest period if the treatment was well tolerated. The antisense polynucleotides of the present invention can be formulated using techniques and formulations described herein (e.g. see Example 13), or otherwise known in the art.

### Example 16

### Method of Treatment Using Gene Therapy-Ex Vivo

[1041] One method of gene therapy transplants fibroblasts, which are capable of expressing a polypeptide, onto a patient. Generally, fibroblasts are obtained from a subject by skin biopsy. The resulting tissue is placed in tissue-culture medium and separated into small pieces. Small chunks of the tissue are placed on a wet surface of a tissue culture flask, approximately ten pieces are placed in each flask. The flask is turned upside down, closed tight and left at room temperature over night. After 24 hours at room temperature, the flask is inverted and the chunks of tissue remain fixed to the bottom of the flask and fresh media (e.g., Ham's F12 media, with 10% FBS, penicillin and streptomycin) is added. The flasks are then incubated at 37 degree C. for approximately one week.

[1042] At this time, fresh media is added and subsequently changed every several days. After an additional two weeks in culture, a monolayer of fibroblasts emerge. The monolayer is trysinized and scaled into larger flasks.

[1043] pMV-7 (Kirschmeier, P. T. et al., DNA, 7:219-25 (1988)), flanked by the long terminal repeats of the Moloney murine sarcoma virus, is digested with EcoRI and HindIII and subsequently treated with calf intestinal phosphatase. The linear vector is fractionated on agarose gel and purified, using glass beads.

[1044] The cDNA encoding a polyp eptide of the present invention can be amplified using PCR primers which correspond to the 5′ and 3′ end sequences respectively as set forth in Example 1 using primers and having appropriate restriction sites and initiation/stop codons, if necessary. Preferably, the 5′ primer contains an EcoRI site and the 3′ primer includes a HindIII site. Equal quantities of the Moloney murine sarcoma virus linear backbone and the amplified EcoRI and HindIII fragment are added together, in the presence of T4 DNA ligase. The resulting mixture is maintained under conditions appropriate for ligation of the two fragments. The ligation mixture is then used to transform bacteria HB101, which are then plated onto agar containing kanamycin for the purpose of confirming that the vector has the gene of interest properly inserted.

[1045] The amphotropic pA317 or GP+am12 packaging cells are grown in tissue culture to confluent density in Dulbecco's Modified Eagles Medium (DMEM) with 10% calf serum (CS), penicillin and streptomycin. The MSV vector containing the gene is then added to the media and the packaging cells transduced with the vector. The packaging cells now produce infectious viral particles containing the gene (the packaging cells are now referred to as producer cells).

[1046] Fresh media is added to the transduced producer cells, and subsequently, the media is harvested from a 10 cm plate of confluent producer cells. The spent media, containing the infectious viral particles, is filtered through a millipore filter to remove detached producer cells and this media is then used to infect fibroblast cells. Media is removed from a sub-confluent plate of fibroblasts and quickly replaced with the media from the producer cells. This media is removed and replaced with fresh media. If the titer of virus is high, then virtually all fibroblasts will be infected and no selection is required. If the titer is very low, then it is necessary to use a retroviral vector that has a selectable marker, such as neo or his. Once the fibroblasts have been efficiently infected, the fibroblasts are analyzed to determine whether protein is produced.

[1047] The engineered fibroblasts are then transplanted onto the host, either alone or after having been grown to confluence on cytodex 3 microcarrier beads.

### Example 17

### Gene Therapy Using Endogenous Genes Corresponding to Polynucleotides of the Invention

[1048] Another method of gene therapy according to the present invention involves operably associating the endogenous polynucleotide sequence of the invention with a promoter via homologous recombination as described, for example, in U.S. Pat. No. 5,641,670, issued Jun. 24, 1997; International Publication NO: WO 96/29411, published Sep. 26, 1996; International Publication NO: WO 94/12650, published Aug. 4, 1994; Koller et al., Proc. Natl. Acad. Sci. USA, 86:8932-8935 (1989); and Zijlstra et al., Nature, 342:435-438 (1989). This method involves the activation of a gene which is present in the target cells, but which is not expressed in the cells, or is expressed at a lower level than desired.

[1049] Polynucleotide constructs are made which contain a promoter and targeting sequences, which are homologous to the 5′ non-coding sequence of endogenous polynucleotide sequence, flanking the promoter. The targeting sequence will be sufficiently near the 5′ end of the polynucleotide sequence so the promoter will be operably linked to the endogenous sequence upon homologous recombination. The promoter and the targeting sequences can be amplified using PCR. Preferably, the amplified promoter contains distinct restriction enzyme sites on the 5′ and 3′ ends. Preferably, the 3′ end of the first targeting sequence contains the same restriction enzyme site as the 5′ end of the amplified promoter and the 5′ end of the second targeting sequence contains the same restriction site as the 3′ end of the amplified promoter.

[1050] The amplified promoter and the amplified targeting sequences are digested with the appropriate restriction enzymes and subsequently treated with calf intestinal phosphatase. The digested promoter and digested targeting sequences are added together in the presence of T4 DNA ligase. The resulting mixture is maintained under conditions appropriate for ligation of the two fragments. The construct is size fractionated on an agarose gel, then purified by phenol extraction and ethanol precipitation.

[1051] In this Example, the polynucleotide constructs are administered as naked polynucleotides via electroporation. However, the polynucleotide constructs may also be administered with transfection-facilitating agents, such as liposomes, viral sequences, viral particles, precipitating agents, etc. Such methods of delivery are known in the art.

[1052] Once the cells are transfected, homologous recombination will take place which results in the promoter being operably linked to the endogenous polynucleotide sequence. This results in the expression of polynucleotide corresponding to the polynucleotide in the cell. Expression may be detected by immunological staining, or any other method known in the art.

[1053] Fibroblasts are obtained from a subject by skin biopsy. The resulting tissue is placed in DMEM+10% fetal calf serum. Exponentially growing or early stationary phase fibroblasts are trypsinized and rinsed from the plastic surface with nutrient medium. An aliquot of the cell suspension is removed for counting, and the remaining cells are subjected to centrifugation. The supernatant is aspirated and the pellet is resuspended in 5 ml of electroporation buffer (20 mM HEPES pH 7.3, 137 mM NaCl, 5 mM KCl, 0.7 mM Na₂ HPO₄, 6 mM dextrose). The cells are recentrifuged, the supernatant aspirated, and the cells resuspended in electroporation buffer containing 1 mg/ml acetylated bovine serum albumin. The final cell suspension contains approximately 3×10⁶ cells/ml. Electroporation should be performed immediately following resuspension.

[1054] Plasmid DNA is prepared according to standard techniques. For example, to construct a plasmid for targeting to the locus corresponding to the polynucleotide of the invention, plasmid pUC18 (MBI Fermentas, Amherst, N.Y.) is digested with HindIII. The CMV promoter is amplified by PCR with an XbaI site on the 5′ end and a BamHI site on the 3′ end. Two non-coding sequences are amplified via PCR: one non-coding sequence (fragment 1) is amplified with a HindIII site at the 5′ end and an Xba site at the 3′end; the other non-coding sequence (fragment 2) is amplified with a BamHI site at the 5′end and a HindIII site at the 3′end. The CMV promoter and the fragments (1 and 2) are digested with the appropriate enzymes (CMV promoter—XbaI and BamHI; fragment 1—XbaI; fragment 2—BamHI) and ligated together. The resulting ligation product is digested with HindIII, and ligated with the HindIII-digested pUC18 plasmid.

[1055] Plasmid DNA is added to a sterile cuvette with a 0.4 cm electrode gap (Bio-Rad). The final DNA concentration is generally at least 120 μg/ml. 0.5 ml of the cell suspension (containing approximately 1.5.×10⁶ cells) is then added to the cuvette, and the cell suspension and DNA solutions are gently mixed. Electroporation is performed with a Gene-Pulser apparatus (Bio-Rad). Capacitance and voltage are set at 960 μF and 250-300 V, respectively. As voltage increases, cell survival decreases, but the percentage of surviving cells that stably incorporate the introduced DNA into their genome increases dramatically. Given these parameters, a pulse time of approximately 14-20 mSec should be observed.

[1056] Electroporated cells are maintained at room temperature for approximately 5 min, and the contents of the cuvette are then gently removed with a sterile transfer pipette. The cells are added directly to 10 ml of prewarmed nutrient media (DMEM with 15% calf serum) in a 10 cm dish and incubated at 37 degree C. The following day, the media is aspirated and replaced with 10 ml of fresh media and incubated for a further 16-24 hours.

[1057] The engineered fibroblasts are then injected into the host, either alone or after having been grown to confluence on cytodex 3 microcarrier beads. The fibroblasts now produce the protein product. The fibroblasts can then be introduced into a patient as described above.

### Example 18

### Method of Treatment Using Gene Therapy—in vivo

[1058] Another aspect of the present invention is using in vivo gene therapy methods to treat disorders, diseases and conditions. The gene therapy method relates to the introduction of naked nucleic acid (DNA, RNA, and antisense DNA or RNA) sequences into an animal to increase or decrease the expression of the polypeptide. The polynucleotide of the present invention may be operatively linked to (i.e., associated with) a promoter or any other genetic elements necessary for the expression of the polypeptide by the target tissue. Such gene therapy and delivery techniques and methods are known in the art, see, for example, WO90/11092, WO98/11779; U.S. Pat. No. 5693622, 5705151, 5580859; Tabata et al., Cardiovasc. Res. 35(3): 470-479 (1997); Chao et al., Pharmacol. Res. 35(6): 517-522 (1997); Wolff, Neuromuscul. Disord. 7(5): 314-318 (1997); Schwartz et al., Gene Ther. 3(5): 405-411 (1996); Tsurumi et al., Circulation 94(12): 3281-3290 (1996) (incorporated herein by reference).

[1059] The polynucleotide constructs may be delivered by any method that delivers injectable materials to the cells of an animal, such as, injection into the interstitial space of tissues (heart, muscle, skin, lung, liver, intestine and the like). The polynucleotide constructs can be delivered in a pharmaceutically acceptable liquid or aqueous carrier.

[1060] The term “naked” polynucleotide, DNA or RNA, refers to sequences that are free from any delivery vehicle that acts to assist, promote, or facilitate entry into the cell, including viral sequences, viral particles, liposome formulations, lipofectin or precipitating agents and the like. However, the polynucleotides of the present invention may also be delivered in liposome formulations (such as those taught in Felgner P. L. et al. (1995) Ann. NY Acad. Sci. 772:126-139 and Abdallah B. et al. (1995) Biol. Cell 85(1): 1-7) which can be prepared by methods well known to those skilled in the art.

[1061] The polynucleotide vector constructs used in the gene therapy method are preferably constructs that will not integrate into the host genome nor will they contain sequences that allow for replication. Any strong promoter known to those skilled in the art can be used for driving the expression of DNA. Unlike other gene therapy techniques, one major advantage of introducing naked nucleic acid sequences into target cells is the transitory nature of the polynucleotide synthesis in the cells. Studies have shown that non-replicating DNA sequences can be introduced into cells to provide production of the desired polypeptide for periods of up to six months.

[1062] The polynucleotide construct can be delivered to the interstitial space of tissues within an animal, including muscle, skin, brain, lung, liver, spleen, bone marrow, thymus, heart, lymph, blood, bone, cartilage, pancreas, kidney, gall bladder, stomach, intestine, testis, ovary, uterus, rectum, nervous system, eye, gland, and connective tissue. Interstitial space of the tissues comprises the intercellular fluid, mucopolysaccharide matrix among the reticular fibers of organ tissues, elastic fibers in the walls of vessels or chambers, collagen fibers of fibrous tissues, or that same matrix within connective tissue ensheathing muscle cells or in the lacunae of bone. It is similarly the space occupied by the plasma of the circulation and the lymph fluid of the lymphatic channels. Delivery to the interstitial space of muscle tissue is preferred for the reasons discussed below. They may be conveniently delivered by injection into the tissues comprising these cells. They are preferably delivered and expressed in persistent, non-dividing cells which are differentiated, although delivery and expression may be achieved in non-differentiated or less completely differentiated cells, such as, for example, stem cells of blood or skin fibroblasts. In vivo muscle cells are particularly competent in their ability to take up and express polynucleotides.

[1063] For the naked polynucleotide injection, an effective dosage amount of DNA or RNA will be in the range of from about 0.05 g/kg body weight to about 50 mg/kg body weight. Preferably the dosage will be from about 0.005 mg/kg to about 20 mg/kg and more preferably from about 0.05 mg/kg to about 5 mg/kg. Of course, as the artisan of ordinary skill will appreciate, this dosage will vary according to the tissue site of injection. The appropriate and effective dosage of nucleic acid sequence can readily be determined by those of ordinary skill in the art and may depend on the condition being treated and the route of administration. The preferred route of administration is by the parenteral route of injection into the interstitial space of tissues. However, other parenteral routes may also be used, such as, inhalation of an aerosol formulation particularly for delivery to lungs or bronchial tissues, throat or mucous membranes of the nose. In addition, naked polynucleotide constructs can be delivered to arteries during angioplasty by the catheter used in the procedure.

[1064] The dose response effects of injected polynucleotide in muscle in vivo is determined as follows. Suitable template DNA for production of mRNA coding for polypeptide of the present invention is prepared in accordance with a standard recombinant DNA methodology. The template DNA, which may be either circular or linear, is either used as naked DNA or complexed with liposomes. The quadriceps muscles of mice are then injected with various amounts of the template DNA.

[1065] Five to six week old female and male Balb/C mice are anesthetized by intraperitoneal injection with 0.3 ml of 2.5% Avertin. A 1.5 cm incision is made on the anterior thigh, and the quadriceps muscle is directly visualized. The template DNA is injected in 0.1 ml of carrier in a 1 cc syringe through a 27 gauge needle over one minute, approximately 0.5 cm from the distal insertion site of the muscle into the knee and about 0.2 cm deep. A suture is placed over the injection site for future localization, and the skin is closed with stainless steel clips.

[1066] After an appropriate incubation time (e.g., 7 days) muscle extracts are prepared by excising the entire quadriceps. Every fifth 15 um cross-section of the individual quadriceps muscles is histochemically stained for protein expression. A time course for protein expression may be done in a similar fashion except that quadriceps from different mice are harvested at different times. Persistence of DNA in muscle following injection may be determined by Southern blot analysis after preparing total cellular DNA and HIRT supernatants from injected and control mice. The results of the above experimentation in mice can be used to extrapolate proper dosages and other treatment parameters in humans and other animals using naked DNA.

### Example 19

### Transgenic Animals

[1067] The polypeptides of the invention can also be expressed in transgenic animals. Animals of any species, including, but not limited to, mice, rats, rabbits, hamsters, guinea pigs, pigs, micro-pigs, goats, sheep, cows and non-human primates, e.g., baboons, monkeys, and chimpanzees may be used to generate transgenic animals. In a specific embodiment, techniques described herein or otherwise known in the art, are used to express polypeptides of the invention in humans, as part of a gene therapy protocol.

[1068] Any technique known in the art may be used to introduce the transgene (i.e., polynucleotides of the invention) into animals to produce the founder lines of transgenic animals. Such techniques include, but are not limited to, pronuclear microinjection, (Paterson et al., Appl. Microbiol. Biotechnol. 40:691-698 (1994); Carver et al., Biotechnology (NY) 11:1263-1270 (1993); Wright et al., Biotechnology (NY) 9:830-834 (1991); and Hoppe et al., U.S. Pat. No. 4,873,191 (1989)); retrovirus mediated gene transfer into germ lines (Van der Putten et al., Proc. Natl. Acad. Sci., USA 82:6148-6152 (1985)), blastocysts or embryos; gene targeting in embryonic stem cells (Thompson et al., Cell 56:313-321 (1989)); electroporation of cells or embryos (Lo, 1983, Mol Cell. Biol. 3:1803-1814 (1983)); introduction of the polynucleotides of the invention using a gene gun (see, e.g., Ulmer et al., Science 259:1745 (1993); introducing nucleic acid constructs into embryonic pleuripotent stem cells and transferring the stem cells back into the blastocyst; and sperm-mediated gene transfer (Lavitrano et al., Cell 57:717-723 (1989); etc. For a review of such techniques, see Gordon, “Transgenic Animals,” Intl. Rev. Cytol. 115:171-229 (1989), which is incorporated by reference herein in its entirety.

[1069] Any technique known in the art may be used to produce transgenic clones containing polynucleotides of the invention, for example, nuclear transfer into enucleated oocytes of nuclei from cultured embryonic, fetal, or adult cells induced to quiescence (Campell et al., Nature 380:64-66 (1996); Wilmut et al., Nature 385:810-813 (1997)).

[1070] The present invention provides for transgenic animals that carry the transgene in all their cells, as well as animals which carry the transgene in some, but not all their cells, i.e., mosaic animals or chimeric. The transgene may be integrated as a single transgene or as multiple copies such as in concatamers, e.g., head-to-head tandems or head-to-tail tandems. The transgene may also be selectively introduced into and activated in a particular cell type by following, for example, the teaching of Lasko et al. (Lasko et al., Proc. Natl. Acad. Sci. USA 89:6232-6236 (1992)). The regulatory sequences required for such a cell-type specific activation will depend upon the particular cell type of interest, and will be apparent to those of skill in the art. When it is desired that the polynucleotide transgene be integrated into the chromosomal site of the endogenous gene, gene targeting is preferred. Briefly, when such a technique is to be utilized, vectors containing some nucleotide sequences homologous to the endogenous gene are designed for the purpose of integrating, via homologous recombination with chromosomal sequences, into and disrupting the function of the nucleotide sequence of the endogenous gene. The transgene may also be selectively introduced into a particular cell type, thus inactivating the endogenous gene in only that cell type, by following, for example, the teaching of Gu et al. (Gu et al., Science 265:103-106 (1994)). The regulatory sequences required for such a cell-type specific inactivation will depend upon the particular cell type of interest, and will be apparent to those of skill in the art.

[1071] Once transgenic animals have been generated, the expression of the recombinant gene may be assayed utilizing standard techniques. Initial screening may be accomplished by Southern blot analysis or PCR techniques to analyze animal tissues to verify that integration of the transgene has taken place. The level of mRNA expression of the transgene in the tissues of the transgenic animals may also be assessed using techniques which include, but are not limited to, Northern blot analysis of tissue samples obtained from the animal, in situ hybridization analysis, and reverse transcriptase-PCR (rt-PCR). Samples of transgenic gene-expressing tissue may also be evaluated immunocytochemically or immunohistochemically using antibodies specific for the transgene product.

[1072] Once the founder animals are produced, they may be bred, inbred, outbred, or crossbred to produce colonies of the particular animal. Examples of such breeding strategies include, but are not limited to: outbreeding of founder animals with more than one integration site in order to establish separate lines; inbreeding of separate lines in order to produce compound transgenics that express the transgene at higher levels because of the effects of additive expression of each transgene; crossing of heterozygous transgenic animals to produce animals homozygous for a given integration site in order to both augment expression and eliminate the need for screening of animals by DNA analysis; crossing of separate homozygous lines to produce compound heterozygous or homozygous lines; and breeding to place the transgene on a distinct background that is appropriate for an experimental model of interest.

[1073] Transgenic animals of the invention have uses which include, but are not limited to, animal model systems useful in elaborating the biological function of polypeptides of the present invention, studying conditions and/or disorders associated with aberrant expression, and in screening for compounds effective in ameliorating such conditions and/or disorders.

### Example 20

### Knock-out Animals

[1074] Endogenous gene expression can also be reduced by inactivating or “knocking out” the gene and/or its promoter using targeted homologous recombination. (e.g., see Smithies et al., Nature 317:230-234 (1985); Thomas & Capecchi, Cell 51:503-512 (1987); Thompson et al., Cell 5:313-321 (1989); each of which is incorporated by reference herein in its entirety). For example, a mutant, non-functional polynucleotide of the invention (or a completely unrelated DNA sequence) flanked by DNA homologous to the endogenous polynucleotide sequence (either the coding regions or regulatory regions of the gene) can be used, with or without a selectable marker and/or a negative selectable marker, to transfect cells that express polypeptides of the invention in vivo. In another embodiment, techniques known in the art are used to generate knockouts in cells that contain, but do not express the gene of interest. Insertion of the DNA construct, via targeted homologous recombination, results in inactivation of the targeted gene. Such approaches are particularly suited in research and agricultural fields where modifications to embryonic stem cells can be used to generate animal offspring with an inactive targeted gene (e.g., see Thomas & Capecchi 1987 and Thompson 1989, supra). However this approach can be routinely adapted for use in humans provided the recombinant DNA constructs are directly administered or targeted to the required site in vivo using appropriate viral vectors that will be apparent to those of skill in the art.

[1075] In further embodiments of the invention, cells that are genetically engineered to express the polypeptides of the invention, or alternatively, that are genetically engineered not to express the polypeptides of the invention (e.g., knockouts) are administered to a patient in vivo. Such cells may be obtained from the patient (i.e., animal, including human) or an MHC compatible donor and can include, but are not limited to fibroblasts, bone marrow cells, blood cells (e.g., lymphocytes), adipocytes, muscle cells, endothelial cells etc. The cells are genetically engineered in vitro using recombinant DNA techniques to introduce the coding sequence of polypeptides of the invention into the cells, or alternatively, to disrupt the coding sequence and/or endogenous regulatory sequence associated with the polypeptides of the invention, e.g., by transduction (using viral vectors, and preferably vectors that integrate the transgene into the cell genome) or transfection procedures, including, but not limited to, the use of plasmids, cosmids, YACs, naked DNA, electroporation, liposomes, etc. The coding sequence of the polypeptides of the invention can be placed under the control of a strong constitutive or inducible promoter or promoter/enhancer to achieve expression, and preferably secretion, of the polypeptides of the invention. The engineered cells which express and preferably secrete the polypeptides of the invention can be introduced into the patient systemically, e.g., in the circulation, or intraperitoneally.

[1076] Alternatively, the cells can be incorporated into a matrix and implanted in the body, e.g., genetically engineered fibroblasts can be implanted as part of a skin graft; genetically engineered endothelial cells can be implanted as part of a lymphatic or vascular graft. (See, for example, Anderson et al. U.S. Pat. No. 5,399,349; and Mulligan & Wilson, U.S. Pat. No. 5,460,959 each of which is incorporated by reference herein in its entirety).

[1077] When the cells to be administered are non-autologous or non-MHC compatible cells, they can be administered using well known techniques which prevent the development of a host immune response against the introduced cells. For example, the cells may be introduced in an encapsulated form which, while allowing for an exchange of components with the immediate extracellular environment, does not allow the introduced cells to be recognized by the host immune system.

[1078] Transgenic and “knock-out” animals of the invention have uses which include, but are not limited to, animal model systems useful in elaborating the biological function of polypeptides of the present invention, studying conditions and/or disorders associated with aberrant expression, and in screening for compounds effective in ameliorating such conditions and/or disorders.

### Example 21

### Assays Detecting Stimulation or Inhibition of B cell Proliferation and Differentiation

[1079] Generation of functional humoral immune responses requires both soluble and cognate signaling between B-lineage cells and their microenvironment. Signals may impart a positive stimulus that allows a B-lineage cell to continue its programmed development, or a negative stimulus that instructs the cell to arrest its current developmental pathway. To date, numerous stimulatory and inhibitory signals have been found to influence B cell responsiveness including IL-2, IL-4, IL-5, IL-6, IL-7, IL10, IL-13, IL-14 and IL-15. Interestingly, these signals are by themselves weak effectors but can, in combination with various co-stimulatory proteins, induce activation, proliferation, differentiation, homing, tolerance and death among B cell populations.

[1080] One of the best studied classes of B-cell co-stimulatory proteins is the TNF-superfamily. Within this family CD40, CD27, and CD30 along with their respective ligands CD154, CD70, and CD153 have been found to regulate a variety of immune responses. Assays which allow for the detection and/or observation of the proliferation and differentiation of these B-cell populations and their precursors are valuable tools in determining the effects various proteins may have on these B-cell populations in terms of proliferation and differentiation. Listed below are two assays designed to allow for the detection of the differentiation, proliferation, or inhibition of B-cell populations and their precursors.

[1081] In Vitro Assay

[1082] Agonists or antagonists of the invention can be assessed for its ability to induce activation, proliferation, differentiation or inhibition and/or death in B-cell populations and their precursors. The activity of the agonists or antagonists of the invention on purified human tonsillar B cells, measured qualitatively over the dose range from 0.1 to 10,000 ng/mL, is assessed in a standard B-lymphocyte co-stimulation assay in which purified tonsillar B cells are cultured in the presence of either formalin-fixed Staphylococcus aureus Cowan I (SAC) or immobilized anti-human IgM antibody as the priming agent. Second signals such as IL-2 and IL-15 synergize with SAC and IgM crosslinking to elicit B. cell proliferation as measured by tritiated-thymidine incorporation. Novel synergizing agents can be readily identified using this assay. The assay involves isolating human tonsillar B cells by magnetic bead (MACS) depletion of CD3-positive cells. The resulting cell population is greater than 95% B cells as assessed by expression of CD45R(B220).

[1083] Various dilutions of each sample are placed into individual wells of a 96-well plate to which are added 10⁵ B-cells suspended in culture medium (RPMI 1640 containing 10% FBS, 5×10⁻⁵M 2ME, 100 U/ml penicillin, 10 ug/ml streptomycin, and 10⁻⁵ dilution of SAC) in a total volume of 150 ul. Proliferation or inhibition is quantitated by a 20 h pulse (1 uCi/well) with 3H-thymidine (6.7 Ci/mM) beginning 72 h post factor addition. The positive and negative controls are IL2 and medium respectively.

[1084] In vivo Assay

[1085] BALB/c mice are injected (i.p.) twice per day with buffer only, or 2 mg/Kg of agonists or antagonists of the invention, or truncated forms thereof. Mice receive this treatment for 4 consecutive days, at which time they are sacrificed and various tissues and serum collected for analyses. Comparison of H&E sections from normal spleens and spleens treated with agonists or antagonists of the invention identify the results of the activity of the agonists or antagonists on spleen cells, such as the diffusion of peri-arterial lymphatic sheaths, and/or significant increases in the nucleated cellularity of the red pulp regions, which may indicate the activation of the differentiation and proliferation of B-cell populations. Immunohistochemical studies using a B cell marker, anti-CD45R(B220), are used to determine whether any physiological changes to splenic cells, such as splenic disorganization, are due to increased B-cell representation within loosely defined B-cell zones that infiltrate established T-cell regions.

[1086] Flow cytometric analyses of the spleens from mice treated with agonist or antagonist is used to indicate whether the agonists or antagonists specifically increases the proportion of ThB+, CD45R(B220)dull B cells over that which is observed in control mice.

[1087] Likewise, a predicted consequence of increased mature B-cell representation in vivo is a relative increase in serum Ig, titers. Accordingly, serum IgM and IgA levels are compared between buffer and agonists or antagonists-treated mice.

[1088] The studies described in this example tested activity of agonists or antagonists of the invention. However, one skilled in the art could easily modify the exemplified studies to test the activity of polynucleotides or polypeptides of the invention (e.g., gene therapy).

### Example 22

### T Cell Proliferation Assay

[1089] A CD3-induced proliferation assay is performed on PBMCs and is measured by the uptake of ³H-thymidine. The assay is performed as follows. Ninety-six well plates are coated with 100 μl/well of mAb to CD3 (HIT3a, Pharmingen) or isotype-matched control mAb (B33.1) overnight at 4 degrees C. (1 μg/ml in 0.05M bicarbonate buffer, pH 9.5), then washed three times with PBS. PBMC are isolated by F/H gradient centrifugation from human peripheral blood and added to quadruplicate wells (5×10⁴/well) of mAb coated plates in RPMI containing 10% FCS and P/S in the presence of varying concentrations of agonists or antagonists of the invention (total volume 200 ul). Relevant protein buffer and medium alone are controls. After 48 hr. culture at 37 degrees C., plates are spun for 2 min. at 1000 rpm and 100 μl of supernatant is removed and stored -20 degrees C. for measurement of IL-2 (or other cytokines) if effect on proliferation is observed. Wells are supplemented with 100 ul of medium containing 0.5 uCi of ³H-thymidine and cultured at 37 degrees C. for 18-24 hr. Wells are harvested and incorporation of ³H-thymidine used as a measure of proliferation. Anti-CD3 alone is the positive control for proliferation. IL-2 (100 U/ml) is also used as a control which enhances proliferation. Control antibody which does not induce proliferation of T cells is used as the negative control for the effects of agonists or antagonists of the invention.

[1090] The studies described in this example tested activity of agohists or antagonists of the invention. However, one skilled in the art could easily modify the exemplified studies to test the activity of polynucleotides or polypeptides of the invention (e.g., gene therapy).

### Example 23

### Effect of Agonists or Antagonists of the Invention on the Expression of MHC Class II, Costimulatory and Adhesion Molecules and Cell Differentiation of Monocytes and Monocyte-derived Human Dendritic Cells

[1091] Dendritic cells are generated by the expansion of proliferating precursors found in the peripheral blood: adherent PBMC or elutriated monocytic fractions are cultured for 7-10 days with GM-CSF (50 ng/ml) and IL-4 (20 ng/ml). These dendritic cells have the characteristic phenotype of immature cells (expression of CD1, CD80, CD86, CD40 and MHC class II antigens). Treatment with activating factors, such as TNF-α, causes a rapid change in surface phenotype (increased expression of MHC class I and II, costimulatory and adhesion molecules, downregulation of FCγRII, upregulation of CD83). These changes correlate with increased antigen-presenting capacity and with functional maturation of the dendritic cells.

[1092] FACS analysis of surface antigens is performed as follows. Cells are treated 1-3 days with increasing concentrations of agonist or antagonist of the invention or LPS (positive control), washed with PBS containing 1% BSA and 0.02 mM sodium azide, and then incubated with 1:20 dilution of appropriate FITC- or PE-labeled monoclonal antibodies for 30 minutes at 4 degrees C. After an additional wash, the labeled cells are analyzed by flow cytometry on a FACScan (Becton Dickinson).

[1093] Effect on the Production of Cytokines.

[1094] Cytokines generated by dendritic cells, in particular IL-12, are important in the initiation of T-cell dependent immune responses. IL-12 strongly influences the development of Th1 helper T-cell immune response, and induces cytotoxic T and NK cell function. An ELISA is used to measure the IL-12 release as follows. Dendritic cells (10⁶/ml) are treated with increasing concentrations of agonists or antagonists of the invention for 24 hours. LPS (100 ng/ml) is added to the cell culture as positive control. Supernatants from the cell cultures are then collected and analyzed for IL-12 content using commercial ELISA kit (e.g., R & D Systems (Minneapolis, Minn.)). The standard protocols provided with the kits are used.

[1095] Effect on the Expression of MHC Class II, Costimulatory and Adhesion Molecules.

[1096] Three major families of cell surface antigens can be identified on monocytes: adhesion molecules, molecules involved in antigen presentation, and Fc receptor. Modulation of the expression of MHC class II antigens and other costimulatory molecules, such as B7 and ICAM-1, may result in changes in the antigen presenting capacity of monocytes and ability to induce T cell activation. Increased expression of Fc receptors may correlate with improved monocyte cytotoxic activity, cytokine release and phagocytosis.

[1097] FACS analysis is used to examine the surface antigens as follows. Monocytes are treated 1-5 days with increasing concentrations of agonists or antagonists of the invention or LPS (positive control), washed with PBS containing 1% BSA and 0.02 mM sodium azide, and then incubated with 1:20 dilution of appropriate FITC- or PE-labeled monoclonal antibodies for 30 minutes at 4 degrees C. After an additional wash, the labeled cells are analyzed by flow cytometry on a FACScan (Becton Dickinson).

[1098] Monocyte Activation and/or Increased Survival.

[1099] Assays for molecules that activate (or alternatively, inactivate) monocytes and/or increase monocyte survival (or alternatively, decrease monocyte survival) are known in the art and may routinely be applied to determine whether a molecule of the invention functions as an inhibitor or activator of monocytes. Agonists or antagonists of the invention can be screened using the three assays described below. For each of these assays, Peripheral blood mononuclear cells (PBMC) are purified from single donor leukopacks (American Red Cross, Baltimore, Md.) by centrifugation through a Histopaque gradient (Sigma). Monocytes are isolated from PBMC by counterflow centrifugal elutriation.

[1100] Monocyte Survival Assay.

[1101] Human peripheral blood monocytes progressively lose viability when cultured in absence of serum or other stimuli. Their death results from internally regulated processes (apoptosis). Addition to the culture of activating factors, such as TNF-alpha dramatically improves cell survival and prevents DNA fragmentation. Propidium iodide (PI) staining is used to measure apoptosis as follows. Monocytes are cultured for 48 hours in polypropylene tubes in serum-free medium (positive control), in the presence of 100 ng/ml TNF-alpha (negative control), and in the presence of varying concentrations of the compound to be tested. Cells are suspended at a concentration of 2×10⁶/ml in PBS containing PI at a final concentration of 5 μg/ml, and then incubated at room temperature for 5 minutes before FACScan analysis. PI uptake has been demonstrated to correlate with DNA fragmentation in this experimental paradigm.

[1102] Effect on Cytokine Release.

[1103] An important function of monocytes/macrophages is their regulatory activity on other cellular populations of the immune system through the release of cytokines after stimulation. An ELISA to measure cytokine release is performed as follows. Human monocytes are incubated at a density of 5×10⁵ cells/ml with increasing concentrations of agonists or antagonists of the invention and under the same conditions, but in the absence of agonists or antagonists. For IL-12 production, the cells are primed overnight with IFN (100 U/ml) in the presence of agonist or antagonist of the invention. LPS (10 ng/ml) is then added. Conditioned media are collected after 24 h and kept frozen until use. Measurement of TNF-alpha, IL-10, MCP-1 and IL-8 is then performed using a commercially available ELISA kit (e.g., R & D Systems (Minneapolis, Minn.)) and applying the standard protocols provided with the kit.

[1104] Oxidative Burst.

[1105] Purified monocytes are plated in 96-w plate at 2-lx10⁵ cell/well. Increasing concentrations of agonists or antagonists of the invention are added to the wells in a total volume of 0.2 ml culture medium (RPMI 1640+10% FCS, glutamine and antibiotics). After 3 days incubation, the plates are centrifuged and the medium is removed from the wells. To the macrophage monolayers, 0.2 ml per well of phenol red solution (140 mM NaCl, 10 mM potassium phosphate buffer pH 7.0, 5.5 mM dextrose, 0.56 mM phenol red and 19 U/ml of HRPO) is added, together with the stimulant (200 nM PMA). The plates are incubated at 37° C. for 2 hours and the reaction is stopped by adding 20 μl 1N NaOH per well. The absorbance is read at 610 nm. To calculate the amount of H₂O₂ produced by the macrophages, a standard curve of a H₂O₂ solution of known molarity is performed for each experiment.

[1106] The studies described in this example tested activity of agonists or antagonists of the invention. However, one skilled in the art could easily modify the exemplified studies to test the activity of polynucleotides or polypeptides of the invention (e.g., gene therapy).

### Example 24

### Biological Effects of Agonists or Antagonists of the Invention Astrocyte and Neuronal Assays

[1107] Agonists or antagonists of the invention, expressed in Escherichia coli and purified as described above, can be tested for activity in promoting the survival, neurite outgrowth, or phenotypic differentiation of cortical neuronal cells and for inducing the proliferation of glial fibrillary acidic protein immunopositive cells, astrocytes. The selection of cortical cells for the bioassay is based on the prevalent expression of FGF-1 and FGF-2 in cortical structures and on the previously reported enhancement of cortical neuronal survival resulting from FGF-2 treatment. A thymidine incorporation assay, for example, can be used to elucidate an agonist or antagonist of the invention's activity on these cells.

[1108] Moreover, previous reports describing the biological effects of FGF-2 (basic FGF) on cortical or hippocampal neurons in vitro have demonstrated increases in both neuron survival and neurite outgrowth (Walicke et al., “Fibroblast growth factor promotes survival of dissociated hippocampal neurons and enhances neurite extension.” Proc. Natl. Acad. Sci. USA 83:3012-3016. (1986), assay herein incorporated by reference in its entirety). However, reports from experiments done on PC-12 cells suggest that these two responses are not necessarily synonymous and may depend on not only which FGF is being tested but also on which receptor(s) are expressed on the target cells. Using the primary cortical neuronal culture paradigm, the ability of an agonist or antagonist of the invention to induce neurite outgrowth can be compared to the response achieved with FGF-2 using, for example, a thymidine incorporation assay.

[1109] Fibroblast and Endothelial Cell Assays

[1110] Human lung fibroblasts are obtained from Clonetics (San Diego, Calif.) and maintained in growth media from Clonetics. Dermal microvascular endothelial cells are obtained from Cell Applications (San Diego, Calif.). For proliferation assays, the human lung fibroblasts and dermal microvascular endothelial cells can be cultured at 5,000 cells/well in a 96-well plate for one day in growth medium. The cells are then incubated for one day in 0.1% BSA basal medium. After replacing the medium with fresh 0.1% BSA medium, the cells are incubated with the test proteins for 3 days. Alamar Blue (Alamar Biosciences, Sacramento, Calif.) is added to each well to a final concentration of 10%. The cells are incubated for 4 hr. Cell viability is measured by reading in a CytoFluor fluorescence reader. For the PGE₂ assays, the human lung fibroblasts are cultured at 5,000 cells/well in a 96-well plate for one day. After a medium change to 0.1% BSA basal medium, the cells are incubated with FGF-2 or agonists or antagonists of the invention with or without IL-1α for 24 hours. The supernatants are collected and assayed for PGE₂ by EIA kit (Cayman, Ann Arbor, Mich.). For the IL-6 assays, the human lung fibroblasts are cultured at 5,000 cells/well in a 96-well plate for one day. After a medium change to 0.1% BSA basal medium, the cells are incubated with FGF-2 or with or without agonists or antagonists of the invention IL-1a for 24 hours. The supernatants are collected and assayed for IL-6 by ELISA kit (Endogen, Cambridge, Mass.).

[1111] Human lung fibroblasts are cultured with FGF-2 or agonists or antagonists of the invention for 3 days in basal medium before the addition of Alamar Blue to assess effects on growth of the fibroblasts. FGF-2 should show a stimulation at 10-2500 ng/ml which can be used to compare stimulation with agonists or antagonists of the invention.

[1112] Parkinson Models.

[1113] The loss of motor function in Parkinson's disease is attributed to a deficiency of striatal dopamine resulting from the degeneration of the nigrostriatal dopaminergic projection neurons. An animal model for Parkinson's that has been extensively characterized involves the systemic administration of l-methyl-4 phenyl 1,2,3,6-tetrahydropyridine (MPTP). In the CNS, MPTP is taken-up by astrocytes and catabolized by monoamine oxidase B to 1-methyl-4-phenyl pyridine (MPP⁺) and released. Subsequently, MPP+is actively accumulated in dopaminergic neurons by the high-affinity reuptake transporter for dopamine. MPP+ is then concentrated in mitochondria by the electrochemical gradient and selectively inhibits nicotidamide adenine disphosphate: ubiquinone oxidoreductionase (complex I), thereby interfering with electron transport and eventually generating oxygen radicals.

[1114] It has been demonstrated in tissue culture paradigms that FGF-2 (basic FGF) has trophic activity towards nigral dopaminergic neurons (Ferrari et al., Dev. Biol. 1989). Recently, Dr. Unsicker's group has demonstrated that administering FGF-2 in gel foam implants in the striatum results in the near complete protection of nigral dopaminergic neurons from the toxicity associated with MPTP exposure (Otto and Unsicker, J. Neuroscience, 1990).

[1115] Based on the data with FGF-2, agonists or antagonists of the invention can be evaluated to determine whether it has an action similar to that of FGF-2 in enhancing dopaminergic neuronal survival in vitro and it can also be tested in vivo for protection of dopaminergic neurons in the striatum from the damage associated with MPTP treatment. The potential effect of an agonist or antagonist of the invention is first examined in vitro in a dopaminergic neuronal cell culture paradigm. The cultures are prepared by dissecting the midbrain floor plate from gestation day 14 Wistar rat embryos. The tissue is dissociated with trypsin and seeded at a density of 200,000 cells/cm² on polyorthinine-laminin coated glass coverslips. The cells are maintained in Dulbecco's Modified Eagle's medium and F12 medium containing hormonal supplements (N1). The cultures are fixed with paraformaldehyde after 8 days in vitro and are processed for tyrosine hydroxylase, a specific marker for dopaminergic neurons, immunohistochemical staining. Dissociated cell cultures are prepared from embryonic rats. The culture medium is changed every third day and the factors are also added at that time.

[1116] Since the dopaminergic neurons are isolated from animals at gestation day 14, a developmental time which is past the stage when the dopaminergic precursor cells are proliferating, an increase in the number of tyrosine hydroxylase immunopositive neurons would represent an increase in the number of dopaminergic neurons surviving in vitro. Therefore, if an agonist or antagonist of the invention acts to prolong the survival of dopaminergic neurons, it would suggest that the agonist or antagonist may be involved in Parkinson's Disease.

[1117] The studies described in this example tested activity of agonists or antagonists of the invention. However, one skilled in the art could easily modify the exemplified studies to test the activity of polynucleotides or polypeptides of the invention (e.g., gene therapy).

### Example 25

### The Effect of Agonists or Antagonists of the Invention on the Growth of Vascular Endothelial Cells

[1118] On day 1, human umbilical vein endothelial cells (HUVEC) are seeded at 2-5×10⁴ cells/35 mm dish density in Ml 99 medium containing 4% fetal bovine serum (FBS), 16 units/ml heparin, and 50 units/ml endothelial cell growth supplements (ECGS, Biotechnique, Inc.). On day 2, the medium is replaced with M199 containing 10% FBS, 8 units/ml heparin. An agonist or antagonist of the invention, and positive controls, such as VEGF and basic FGF (bFGF) are added, at varying concentrations. On days 4 and 6, the medium is replaced. On day 8, cell number is determined with a Coulter Counter.

[1119] An increase in the number of HUVEC cells indicates that the compound of the invention may proliferate vascular endothelial cells, while a decrease in the number of HUVEC cells indicates that the compound of the invention inhibits vascular endothelial cells.

[1120] The studies described in this example tested activity of a polypeptide of the invention. However, one skilled in the art could easily modify the exemplified studies to test the activity of polynucleotides (e.g., gene therapy), agonists, and/or antagonists of the invention.

### Example 26

### Rat Corneal Wound Healing Model

[1121] This animal model shows the effect of an agonist or antagonist of the invention on neovascularization. The experimental protocol includes:

[1122] a) Making a 1-1.5 mm long incision from the center of cornea into the stromal layer.

[1123] b) Inserting a spatula below the lip of the incision facing the outer corner of the eye.

[1124] c) Making a pocket (its base is 1-1.5 mm form the edge of the eye).

[1125] d) Positioning a pellet, containing 50 ng-5 ug of an agonist or antagonist of the invention, within the pocket.

[1126] e) Treatment with an agonist or antagonist of the invention can also be applied topically to the corneal wounds in a dosage range of 20 mg -500 mg (daily treatment for five days).

[1127] The studies described in this example tested activity of agonists or antagonists of the invention. However, one skilled in the art could easily modify the exemplified studies to test the activity of polynucleotides or polypeptides of the invention (e.g., gene therapy).

### Example 27

### Diabetic Mouse and Glucocorticoid-impaired Wound Healing Models

[1128] Diabetic db+/db+ Mouse Model.

[1129] To demonstrate that an agonist or antagonist of the invention accelerates the healing process, the genetically diabetic mouse model of wound healing is used. The full thickness wound healing model in the db+/db+ mouse is a well characterized, clinically relevant and reproducible model of impaired wound healing. Healing of the diabetic wound is dependent on formation of granulation tissue and re-epithelialization rather than contraction (Gartner, M. H. et al., J. Surg. Res. 52:389 (1992); Greenhalgh, D. G. et al., Am. J. Pathol. 136:1235 (1990)).

[1130] The diabetic animals have many of the characteristic features observed in Type II diabetes mellitus. Homozygous (db+/db+) mice are obese in comparison to their normal heterozygous (db+/+m) littermates. Mutant diabetic (db+/db+) mice have a single autosomal recessive mutation on chromosome 4 (db+) (Coleman et al. Proc. Natl. Acad. Sci. USA 77:283-293 (1982)). Animals show polyphagia, polydipsia and polyuria. Mutant diabetic mice (db+/db+) have elevated blood glucose, increased or normal insulin levels, and suppressed cell-mediated immunity (Mandel et al., J. Immunol. 120:1375 (1978); Debray-Sachs, M. et al, Clin. Exp. Immunol. 51(1): 1-7 (1983); Leiter et al., Am. J. of Pathol. 114:46-55 (1985)). Peripheral neuropathy, myocardial complications, and microvascular lesions, basement membrane thickening and glomerular filtration abnormalities have been described in these animals (Norido, F. et al., Exp. Neurol. 83(2):221-232 (1984); Robertson et al., Diabetes 29(1):60-67 (1980); Giacomelli et al., Lab Invest. 40(4):460-473 (1979); Coleman, D. L., Diabetes 31 (Suppl):1-6 (1982)). These homozygous diabetic mice develop hyperglycemia that is resistant to insulin analogous to human type II diabetes (Mandel et al., J. Jmmunol. 120:1375-1377 (1978)).

[1131] The characteristics observed in these animals suggests that healing in this model may be similar to the healing observed in human diabetes (Greenhalgh, et al., Am. J. of Pathol. 136:1235-1246 (1990)).

[1132] Genetically diabetic female C57BL/KsJ (db+/db+) mice and their non-diabetic (db+/+m) heterozygous littermates are used in this study (Jackson Laboratories). The animals are purchased at 6 weeks of age and are 8 weeks old at the beginning of the study. Animals are individually housed and received food and water ad libitum. All manipulations are performed using aseptic techniques. The experiments are conducted according to the rules and guidelines of Human Genome Sciences, Inc. Institutional Animal Care and Use Committee and the Guidelines for the Care and Use of Laboratory Animals.

[1133] Wounding protocol is performed according to previously reported methods (Tsuboi, R. and Rifkin, D. B., J. Exp. Med. 172:245-251 (1990)). Briefly, on the day of wounding, animals are anesthetized with an intraperitoneal injection of Avertin (0.01 mg/mL), 2,2,2-tribromoethanol and 2-methyl-2-butanol dissolved in deionized water. The dorsal region of the animal is shaved and the skin washed with 70% ethanol solution and iodine. The surgical area is dried with sterile gauze prior to wounding. An 8 mm full-thickness wound is then created using a Keyes tissue punch. Immediately following wounding, the surrounding skin is gently stretched to eliminate wound expansion. The wounds are left open for the duration of the experiment. Application of the treatment is given topically for 5 consecutive days commencing on the day of wounding. Prior to treatment, wounds are gently cleansed with sterile saline and gauze sponges.

[1134] Wounds are visually examined and photographed at a fixed distance at the day of surgery and at two day intervals thereafter. Wound closure is determined by daily measurement on days 1-5 and on day 8. Wounds are measured horizontally and vertically using a calibrated Jameson caliper. Wounds are considered healed if granulation tissue is no longer visible and the wound is covered by a continuous epithelium.

[1135] An agonist or antagonist of the invention is administered using at a range different doses, from 4 mg to 500 mg per wound per day for 8 days in vehicle. Vehicle control groups received 50 mL of vehicle solution.

[1136] Animals are euthanized on day 8 with an intraperitoneal injection of sodium pentobarbital (300 mg/kg). The wounds and surrounding skin are then harvested for histology and immunohistochemistry. Tissue specimens are placed in 10% neutral buffered formalin in tissue cassettes between biopsy sponges for further processing.

[1137] Three groups of 10 animals each (5 diabetic and 5 non-diabetic controls) are evaluated: 1) Vehicle placebo control, 2) untreated group, and 3) treated group.

[1138] Wound closure is analyzed by measuring the area in the vertical and horizontal axis and obtaining the total square area of the wound. Contraction is then estimated by establishing the differences between the initial wound area (day 0) and that of post treatment (day 8). The wound area on day 1 is 64 mm², the corresponding size of the dermal punch. Calculations are made using the following formula:

[Open area on day 8]−[Open area on day 1]/[Open area on day 1]

[1139] Specimens are fixed in 10% buffered formalin and paraffin embedded blocks are sectioned perpendicular to the wound surface (5 mm) and cut using a Reichert-Jung microtome. Routine hematoxylin-eosin (H&E) staining is performed on cross-sections of bisected wounds. Histologic examination of the wounds are used to assess whether the healing process and the morphologic appearance of the repaired skin is altered by treatment with an agonist or antagonist of the invention. This assessment included verification of the presence of cell accumulation, inflammatory cells, capillaries, fibroblasts, re-epithelialization and epidermal maturity (Greenhalgh, D. G. et al., Am. J. Pathol. 136:1235 (1990)). A calibrated lens micrometer is used by a blinded observer.

[1140] Tissue sections are also stained immunohistochemically with a polyclonal rabbit anti-human keratin antibody using ABC Elite detection system. Human skin is used as a positive tissue control while non-immune IgG is used as a negative control. Keratinocyte growth is determined by evaluating the extent of reepithelialization of the wound using a calibrated lens micrometer.

[1141] Proliferating cell nuclear antigen/cyclin (PCNA) in skin specimens is demonstrated by using anti-PCNA antibody (1:50) with an ABC Elite detection system. Human colon cancer served as a positive tissue control and human brain tissue is used as a negative tissue control. Each specimen included a section with omission of the primary antibody and substitution with non-immune mouse IgG. Ranking of these sections is based on the extent of proliferation on a scale of 0-8, the lower side of the scale reflecting slight proliferation to the higher side reflecting intense proliferation.

[1142] Experimental data are analyzed using an unpaired t test. A p value of <0.05 is considered significant.

[1143] Steroid Impaired Rat Model

[1144] The inhibition of wound healing by steroids has been well documented in various in vitro and in vivo systems (Wahl, Glucocorticoids and Wound healing. In: Anti-Inflammatory Steroid Action: Basic and Clinical Aspects. 280-302 (1989); Wahlet al., J. Immunol. 115: 476-481 (1975); Werb et al., J. Exp. Med. 147:1684-1694 (1978)). Glucocorticoids retard wound healing by inhibiting angiogenesis, decreasing vascular permeability (Ebert et al., An. Intern. Med. 37:701-705 (1952)), fibroblast proliferation, and collagen synthesis (Beck et al., Growth Factors. 5: 295-304 (1991); Haynes et al., J. Clin. Invest. 61: 703-797 (1978)) and producing a transient reduction of circulating monocytes (Haynes et al., J. Clin. Invest. 61: 703-797 (1978); Wahl, “Glucocorticoids and wound healing”, In: Antiinflammatory Steroid Action: Basic and Clinical Aspects, Academic Press, New York, pp. 280-302 (1989)). The systemic administration of steroids to impaired wound healing is a well establish phenomenon in rats (Beck et al., Growth Factors. 5: 295-304 (1991); Haynes et al., J. Clin. Invest. 61: 703-797 (1978); Wahl, “Glucocorticoids and wound healing”, In: Antiinflammatory Steroid Action: Basic and Clinical Aspects, Academic Press, New York, pp. 280-302 (1989); Pierce et al., Proc. Natl. Acad. Sci. USA 86: 2229-2233 (1989)).

[1145] To demonstrate that an agonist or antagonist of the invention can accelerate the healing process, the effects of multiple topical applications of the agonist or antagonist on full thickness excisional skin wounds in rats in which healing has been impaired by the systemic administration of methylprednisolone is assessed.

[1146] Young adult male Sprague Dawley rats weighing 250-300 g (Charles River Laboratories) are used in this example. The animals are purchased at 8 weeks of age and are 9 weeks old at the beginning of the study. The healing response of rats is impaired by the systemic administration of methylprednisolone (17 mg/kg/rat intramuscularly) at the time of wounding. Animals are individually housed and received food and water ad libitum. All manipulations are performed using aseptic techniques. This study is conducted according to the rules and guidelines of Human Genome Sciences, Inc. Institutional Animal Care and Use Committee and the Guidelines for the Care and Use of Laboratory Animals.

[1147] The wounding protocol is followed according to section A, above. On the day of wounding, animals are anesthetized with an intramuscular injection of ketamine (50 mg/kg) and xylazine (5 mg/kg). The dorsal region of the animal is shaved and the skin washed with 70% ethanol and iodine solutions. The surgical area is dried with sterile gauze prior to wounding. An 8 mm full-thickness wound is created using a Keyes tissue punch. The wounds are left open for the duration of the experiment. Applications of the testing materials are given topically once a day for 7 consecutive days commencing on the day of wounding and subsequent to methylprednisolone administration. Prior to treatment, wounds are gently cleansed with sterile saline and gauze sponges.

[1148] Wounds are visually examined and photographed at a fixed distance at the day of wounding and at the end of treatment. Wound closure is determined by daily measurement on days 1-5 and on day 8. Wounds are measured horizontally and vertically using a calibrated Jameson caliper. Wounds are considered healed if granulation tissue is no longer visible and the wound is covered by a continuous epithelium.

[1149] The agonist or antagonist of the invention is administered using at a range different doses, from 4 mg to 500 mg per wound per day for 8 days in vehicle. Vehicle control groups received 50 mL of vehicle solution.

[1150] Animals are euthanized on day 8 with an intraperitoneal injection of sodium pentobarbital (300 mg/kg). The wounds and surrounding skin are then harvested for histology. Tissue specimens are placed in 10% neutral buffered formalin in tissue cassettes between biopsy sponges for further processing.

[1151] Three groups of 10 animals each (5 with methylprednisolone and 5 without glucocorticoid) are evaluated: 1) Untreated group 2) Vehicle placebo control 3) treated groups.

[1152] Wound closure is analyzed by measuring the area in the vertical and horizontal axis and obtaining the total area of the wound. Closure is then estimated by establishing the differences between the initial wound area (day 0) and that of post treatment (day 8). The wound area on day 1 is 64 mm , the corresponding size of the dermal punch. Calculations are made using the following formula:

[Open area on day 8]−[Open area on day 1]/[Open area on day 1]

[1153] Specimens are fixed in 10% buffered formalin and paraffin embedded blocks are sectioned perpendicular to the wound surface (5 mm) and cut using an Olympus microtome. Routine hematoxylin-eosin (H&E) staining is performed on cross-sections of bisected wounds. Histologic examination of the wounds allows assessment of whether the healing process and the morphologic appearance of the repaired skin is improved by treatment with an agonist or antagonist of the invention. A calibrated lens micrometer is used by a blinded observer to determine the distance of the wound gap.

[1154] Experimental data are analyzed using an unpaired t test. A p value of <0.05 is considered significant.

[1155] The studies described in this example tested activity of agonists or antagonists of the invention. However, one skilled in the art could easily modify the exemplified studies to test the activity of polynucleotides or polypeptides of the invention (e.g., gene therapy).

### Example 28

### Lymphadema Animal Model

[1156] The purpose of this experimental approach is to create an appropriate and consistent lymphedema model for testing the therapeutic effects of an agonist or antagonist of the invention in lymphangiogenesis and re-establishment of the lymphatic circulatory system in the rat hind limb. Effectiveness is measured by swelling volume of the affected limb, quantification of the amount of lymphatic vasculature, total blood plasma protein, and histopathology. Acute lymphedema is observed for 7-10 days. Perhaps more importantly, the chronic progress of the edema is followed for up to 3-4 weeks.

[1157] Prior to beginning surgery, blood sample is drawn for protein concentration analysis. Male rats weighing approximately ˜350 g are dosed with Pentobarbital. Subsequently, the right legs are shaved from knee to hip. The shaved area is swabbed with gauze soaked in 70% EtOH. Blood is drawn for serum total protein testing. Circumference and volumetric measurements are made prior to injecting dye into paws after marking 2 measurement levels (0.5 cm above heel, at mid-pt of dorsal paw). The intradermal dorsum of both right and left paws are injected with 0.05 ml of 1% Evan's Blue. Circumference and volumetric measurements are then made following injection of dye into paws.

[1158] Using the knee joint as a landmark, a mid-leg inguinal incision is made circumferentially allowing the femoral vessels to be located. Forceps and hemostats are used to dissect and separate the skin flaps. After locating the femoral vessels, the lymphatic vessel that runs along side and underneath the vessel(s) is located. The main lymphatic vessels in this area are then electrically coagulated or suture ligated.

[1159] Using a microscope, muscles in back of the leg (near the semitendinosis and adductors) are bluntly dissected. The popliteal lymph node is then located. The 2 proximal and 2 distal lymphatic vessels and distal blood supply of the popliteal node are then ligated by suturing. The popliteal lymph node, and any accompanying adipose tissue, is then removed by cutting connective tissues.

[1160] Care is taken to control any mild bleeding resulting from this procedure. After lymphatics are occluded, the skin flaps are sealed by using liquid skin (Vetbond) (A J Buck). The separated skin edges are sealed to the underlying muscle tissue while leaving a gap of ˜0.5 cm around the leg. Skin also may be anchored by suturing to underlying muscle when necessary.

[1161] To avoid infection, animals are housed individually with mesh (no bedding). Recovering animals are checked daily through the optimal edematous peak, which typically occurred by day 5-7. The plateau edematous peak are then observed. To evaluate the intensity of the lymphedema, the circumference and volumes of 2 designated places on each paw before operation and daily for 7 days are measured. The effect of plasma proteins on lymphedema is determined and whether protein analysis is a useful testing perimeter is also investigated. The weights of both control and edematous limbs are evaluated at 2 places. Analysis is performed in a blind manner.

[1162] Circumference Measurements: Under brief gas anesthetic to prevent limb movement, a cloth tape is used to measure limb circumference. Measurements are done at the ankle bone and dorsal paw by 2 different people and those 2 readings are averaged. Readings are taken from both control and edematous limbs.

[1163] Volumetric Measurements: On the day of surgery, animals are anesthetized with Pentobarbital and are tested prior to surgery. For daily volumetrics animals are under brief halothane anesthetic (rapid immobilization and quick recovery), and both legs are shaved and equally marked using waterproof marker on legs. Legs are first dipped in water, then dipped into instrument to each marked level then measured by Buxco edema software(Chen/Victor). Data is recorded by one person, while the other is dipping the limb to marked area.

[1164] Blood-plasma protein measurements: Blood is drawn, spun, and serum separated prior to surgery and then at conclusion for total protein and Ca2⁺ comparison.

[1165] Limb Weight Comparison: After drawing blood, the animal is prepared for tissue collection. The limbs are amputated using a quillitine, then both experimental and control legs are cut at the ligature and weighed. A second weighing is done as the tibio-cacaneal joint is disarticulated and the foot is weighed.

[1166] Histological Preparations:

[1167] The transverse muscle located behind the knee (popliteal) area is dissected and arranged in a metal mold, filled with freezeGel, dipped into cold methylbutane, placed into labeled sample bags at −80EC until sectioning. Upon sectioning, the muscle is observed under fluorescent microscopy for lymphatics.

[1168] The studies described in this example tested activity of agonists or antagonists of the invention. However, one skilled in the art could easily modify the exemplified studies to test the activity of polynucleotides or polypeptides of the invention (e.g., gene therapy).

### Example 29

### Suppression of TNF Alpha-induced Adhesion Molecule Expression by an Agonist or Antagonist of the Invention

[1169] The recruitment of lymphocytes to areas of inflammation and angiogenesis involves specific receptor-ligand interactions between cell surface adhesion molecules (CAMs) on lymphocytes and the vascular endothelium. The adhesion process, in both normal and pathological settings, follows a multi-step cascade that involves intercellular adhesion molecule-1 (ICAM-1), vascular cell adhesion molecule-1 (VCAM-1), and endothelial leukocyte adhesion molecule-1 (E-selectin) expression on endothelial cells (EC). The expression of these molecules and others on the vascular endothelium determines the efficiency with which leukocytes may adhere to the local vasculature and extravasate into the local tissue during the development of an inflammatory response. The local concentration of cytokines and growth factor participate in the modulation of the expression of these CAMs.

[1170] Tumor necrosis factor alpha (TNF-a), a potent proinflammatory cytokine, is a stimulator of all three CAMs on endothelial cells and may be involved in a wide variety of inflammatory responses, often resulting in a pathological outcome.

[1171] The potential of an agonist or antagonist of the invention to mediate a suppression of TNF-a induced CAM expression can be examined. A modified ELISA assay which uses ECs as a solid phase absorbent is employed to measure the amount of CAM expression on TNF-a treated ECs when co-stimulated with a member of the FGF family of proteins.

[1172] To perform the experiment, human umbilical vein endothelial cell (HUVEC) cultures are obtained from pooled cord harvests and maintained in growth medium (EGM-2; Clonetics, San Diego, Calif.) supplemented with 10% FCS and 1% penicillin/streptomycin in a 37 degree C humidified incubator containing 5% CO₂. HUVECs are seeded in 96-well plates at concentrations of 1×10⁴ cells/well in EGM medium at 37 degree C. for 18-24 hrs or until confluent. The monolayers are subsequently washed 3 times with a serum-free solution of RPMI-1640 supplemented with 100 U/ml penicillin and 100 mg/ml streptomycin, and treated with a given cytokine and/or growth factor(s) for 24 h at 37 degree C. Following incubation, the cells are then evaluated for CAM expression.

[1173] Human Umbilical Vein Endothelial cells (HUVECs) are grown in a standard 96 well plate to confluence. Growth medium is removed from the cells and replaced with 90 ul of 199 Medium (10% FBS). Samples for testing and positive or negative controls are added to the plate in triplicate (in 10 ul volumes). Plates are incubated at 37 degree C. for either 5 h (selectin and integrin expression) or 24 h (integrin expression only). Plates are aspirated to remove medium and 100 μl of 0.1% paraformaldehyde-PBS(with Ca++ and Mg++) is added to each well. Plates are held at 4° C. for 30 min.

[1174] Fixative is then removed from the wells and wells are washed 1× with PBS(+Ca,Mg)+0.5% BSA and drained. Do not allow the wells to dry. Add 10 μl of diluted primary antibody to the test and control wells. Anti-ICAM-1-Biotin, Anti-VCAM-1-Biotin and Anti-E-selectin-Biotin are used at a concentration of 10 μg/ml (1:10 dilution of 0.1 mg/ml stock antibody). Cells are incubated at 37° C. for 30 min. in a humidified environment. Wells are washed ×3 with PBS(+Ca,Mg)+0.5% BSA.

[1175] Then add 20 il of diluted ExtrAvidin-Alkaline Phosphotase (1:5,000 dilution) to each well and incubated at 37° C. for 30 min. Wells are washed X3 with PBS(+Ca,Mg)+0.5% BSA. 1 tablet of p-Nitrophenol Phosphate pNPP is dissolved in 5 ml of glycine buffer (pH 10.4). 100 82 l of pNPP substrate in glycine buffer is added to each test well. Standard wells in triplicate are prepared from the working dilution of the ExtrAvidin-Alkaline Phosphotase in glycine buffer:-1:5,000 (10⁰)>10^{-0.5}>10⁻¹>10^{-1.5}.5 μl of each dilution is added to triplicate wells and the resulting AP content in each well is 5.50 ng, 1.74 ng, 0.55 ng, 0.18 ng. 100 μl of pNNP reagent must then be added to each of the standard wells. The plate must be incubated at 37° C. for 4 h. A volume of 50 μl of 3M NaOH is added to all wells. The results are quantified on a plate reader at 405 nm. The background subtraction option is used on blank wells filled with glycine buffer only. The template is set up to indicate the concentration of AP-conjugate in each standard well [5.50 ng; 1.74 ng; 0.55 ng; 0.18 ng]. Results are indicated as amount of bound AP-conjugate in each sample.

[1176] The studies described in this example tested activity of agonists or antagonists of the invention. However, one skilled in the art could easily modify the exemplified studies to test the activity of polynucleotides or polypeptides of the invention (e.g., gene therapy).

### Example 30

### Production of Polypeptide of the Invention for High-throughput Screening Assays

[1177] The following protocol produces a supernatant containing polypeptide of the present invention to be tested. This supernatant can then be used in the Screening Assays described in Examples 32-41.

[1178] First, dilute Poly-D-Lysine (644 587 Boehringer-Mannheim) stock solution (lmg/ml in PBS) 1:20 in PBS (w/o calcium or magnesium 17-516F Biowhittaker) for a working solution of 50 ug/ml. Add 200 ul of this solution to each well (24 well plates) and incubate at RT for 20 minutes. Be sure to distribute the solution over each well (note: a 12-channel pipetter may be used with tips on every other channel). Aspirate off the Poly-D-Lysine solution and rinse with lml PBS (Phosphate Buffered Saline). The PBS should remain in the well until just prior to plating the cells and plates may be poly-lysine coated in advance for up to two weeks.

[1179] Plate 293T cells (do not carry cells past P+20) at 2×10⁵ cells/well in 0.5 ml DMEM(Dulbecco's Modified Eagle Medium)(with 4.5 G/L glucose and L-glutamine (12-604F Biowhittaker))/10% heat inactivated FBS(14-503F Biowhittaker)/1× Penstrep(17-602E Biowhittaker). Let the cells grow overnight.

[1180] The next day, mix together in a sterile solution basin: 300 ul Lipofectamine (18324-012 Gibco/BRL) and 5 ml Optimem 1 (31985070 Gibco/BRL)/96-well plate. With a small volume multi-channel pipetter, aliquot approximately 2 ug of an expression vector containing a polynucleotide insert, produced by the methods described in Examples 8-10, into an appropriately labeled 96-well round bottom plate. With a multi-channel pipetter, add 50 ul of the Lipofectamine/Optimem I mixture to each well. Pipette up and down gently to mix. Incubate at RT 15-45 minutes. After about 20 minutes, use a multi-channel pipetter to add 150 ul Optimem I to each well. As a control, one plate of vector DNA lacking an insert should be transfected with each set of transfections.

[1181] Preferably, the transfection should be performed by tag-teaming the following tasks. By tag-teaming, hands on time is cut in half, and the cells do not spend too much time on PBS. First, person A aspirates off the media from four 24-well plates of cells, and then person B rinses each well with 0.5-1 ml PBS. Person A then aspirates off PBS rinse, and person B, using a12-channel pipetter with tips on every other channel, adds the 200 ul of DNA/Lipofectamine/Optimem I complex to the odd wells first, then to the even wells, to each row on the 24-well plates. Incubate at 37 degree C. for 6 hours.

[1182] While cells are incubating, prepare appropriate media, either 1%BSA in DMEM with 1× penstrep, or HGS CHO-5 media (116.6 mg/L of CaCl₂ (anhyd); 0.00130 mg/L CuSO₄-5H₂O; 0.050 mg/L of Fe(NO₃)₃-9H₂O; 0.417 mg/L of FeSO₄-7H₂O; 311.80 mg/L of Kcl; 28.64 mg/L of MgCi₂; 48.84 mg/L of MgSO₄; 6995.50 mg/L of NaCl; 2400.0 mg/L of NaHCO₃; 62.50 mg/L of NaH₂PO₄-H₂O; 71.02 mg/L of Na₂HPO₄; 0.4320 mg/L of ZnSO₄-7H₂O; 0.002 mg/L of Arachidonic Acid; 1.022 mg/L of Cholesterol; 0.070 mg/L of DL-alpha-Tocopherol-Acetate; 0.0520 mg/L of Linoleic Acid; 0.010 mg/L of Linolenic Acid; 0.010 mg/L of Myristic Acid; 0.010 mg/L of Oleic Acid; 0.010 mg/L of Palmitric Acid; 0.010 mg/L of Palmitic Acid; 100 mg/L of Pluronic F-68; 0.010 mg/L of Stearic Acid; 2.20 mg/L of Tween 80; 4551 mg/L of D-Glucose; 130.85 mg/ml of L-Alanine; 147.50 mg/ml of L-Arginine-HCL; 7.50 mg/ml of L-Asparagine-H₂O; 6.65 mg/ml of L-Aspartic Acid; 29.56 mg/ml of L-Cystine-2HCL-H₂O; 31.29 mg/ml of L-Cystine-2HCL; 7.35 mg/ml of L-Glutamic Acid; 365.0 mg/ml of L-Glutamine; 18.75 mg/ml of Glycine; 52.48 mg/ml of L-Histidine-HCL-H₂O; 106.97 mg/ml of L-Isoleucine; 111.45 mg/ml of L-Leucine; 163.75 mg/ml of L-Lysine HCL; 32.34 mg/ml of L-Methionine; 68.48 mg/ml of L-Phenylalainine; 40.0 mg/ml of L-Proline; 26.25 mg/ml of L-Serine; 101.05 mg/ml of L-Threonine; 19.22 mg/ml of L-Tryptophan; 91.79 mg/ml of L-Tryrosine-2Na-2H₂O; and 99.65 mg/ml of L-Valine; 0.0035 mg/L of Biotin; 3.24 mg/L of D-Ca Pantothenate; 11.78 mg/L of Choline Chloride; 4.65 mg/L of Folic Acid; 15.60 mg/L of i-Inositol; 3.02 mg/L of Niacinamide; 3.00 mg/L of Pyridoxal HCL; 0.031 mg/L of Pyridoxine HCL; 0.319 mg/L of Riboflavin; 3.17 mg/L of Thiamine HCL; 0.365 mg/L of Thymidine; 0.680 mg/L of Vitamin B₁₂; 25 mM of HEPES Buffer; 2.39 mg/L of Na Hypoxanthine; 0.105 mg/L of Lipoic Acid; 0.081 mg/L of Sodium Putrescine-2HCL; 55.0 mg/L of Sodium Pyruvate; 0.0067 mg/L of Sodium Selenite; 20 uM of Ethanolamine; 0.122 mg/L of Ferric Citrate; 41.70 mg/L of Methyl-B-Cyclodextrin complexed with Linoleic Acid; 33.33 mg/L of Methyl-B-Cyclodextrin complexed with Oleic Acid; 10 mg/L of Methyl-B-Cyclodextrin complexed with Retinal Acetate. Adjust osmolarity to 327 mOsm) with 2 mm glutamine and lx penstrep. (BSA (81-068-3 Bayer) 100 gm dissolved in 1L DMEM for a 10% BSA stock solution). Filter the media and collect 50 ul for endotoxin assay in 15 ml polystyrene conical.

[1183] The transfection reaction is terminated, preferably by tag-teaming, at the end of the incubation period. Person A aspirates off the transfection media, while person B adds 1.5 ml appropriate media to each well. Incubate at 37 degree C. for 45 or 72 hours depending on the media used: 1%BSA for 45 hours or CHO-5 for 72 hours.

[1184] On day four, using a 300 ul multichannel pipetter, aliquot 600 ul in one lml deep well plate and the remaining supernatant into a 2 ml deep well. The supernatants from each well can then be used in the assays described in Examples 32-39.

[1185] It is specifically understood that when activity is obtained in any of the assays described below using a supernatant, the activity originates from either the polypeptide of the present invention directly (e.g., as a secreted protein) or by polypeptide of the present invention inducing expression of other proteins, which are then secreted into the supernatant. Thus, the invention further provides a method of identifying the protein in the supernatant characterized by an activity in a particular assay.

### Example 31

### Construction of GAS Reporter Construct

[1186] One signal transduction pathway involved in the differentiation and proliferation of cells is called the Jaks-STATs pathway. Activated proteins in the Jaks-STATs pathway bind to gamma activation site “GAS” elements or interferon-sensitive responsive element (“ISRE”), located in the promoter of many genes. The binding of a protein to these elements alter the expression of the associated gene.

[1187] GAS and ISRE elements are recognized by a class of transcription factors called Signal Transducers and Activators of Transcription, or “STATs.” There are six members of the STATs family. Stat1 and Stat3 are present in many cell types, as is Stat2 (as response to IFN-alpha is widespread). Stat4 is more restricted and is not in many cell types though it has been found in T helper class I, cells after treatment with IL-12. Stat5 was originally called mammary growth factor, but has been found at higher concentrations in other cells including myeloid cells. It can be activated in tissue culture cells by many cytokines.

[1188] The STATs are activated to translocate from the cytoplasm to the nucleus upon tyrosine phosphorylation by a set of kinases known as the Janus Kinase (“Jaks”) family. Jaks represent a distinct family of soluble tyrosine kinases and include Tyk2, Jakl, Jak2, and Jak3. These kinases display significant sequence similarity and are generally catalytically inactive in resting cells.

[1189] The Jaks are activated by a wide range of receptors summarized in the Table below. (Adapted from review by Schidler and Darnell, Ann. Rev. Biochem. 64:621-51 (1995)). A cytokine receptor family, capable of activating Jaks, is divided into two groups: (a) Class 1 includes receptors for IL-2, IL-3, IL-4, IL-6, IL-7, IL-9, IL-11, IL-12, IL-15, Epo, PRL, GH, G-CSF, GM-CSF, LIF, CNTF, and thrombopoietin; and (b) Class 2 includes IFN-a, IFN-g, and IL-10. The Class 1 receptors share a conserved cysteine motif (a set of four conserved cysteines and one tryptophan) and a WSXWS motif (a membrane proximal region encoding Trp-Ser-Xaa-Trp-Ser (SEQ ID NO: 2)).

[1190] Thus, on binding of a ligand to a receptor, Jaks are activated, which in turn activate STATs, which then translocate and bind to GAS elements. This entire process is encompassed in the Jaks-STATs signal transduction pathway. Therefore, activation of the Jaks-STATs pathway, reflected by the binding of the GAS or the ISRE element, can be used to indicate proteins involved in the proliferation and differentiation of cells. For example, growth factors and cytokines are known to activate the Jaks-STATs pathway (See Table below). Thus, by using GAS elements linked to reporter molecules, activators of the Jaks-STATs pathway can be identified.

| | | JAKs | | | | |
|---|---|---|---|---|---|---|
| Ligand | tyk2 | Jak1 | Jak2 | Jak3 | STATS | GAS(elements) or ISRE |

IFN family

| | | | | | | |
|---|---|---|---|---|---|---|
| IFN-a/B | + | + | − | − | 1,2,3 | ISRE |
| IFN-g | | + | + | − | 1 | GAS (IRF1 > Lys6 > IFP) |
| I1-10 | + | ? | ? | − | 1,3 | |
| gp130 family | | | | | | |
| IL-6 (Pleiotropic) | + | + | + | ? | 1,3 | GAS (IRF1 > Lys6 > IFP) |
| Il-1 1(Pleiotropic) | ? | + | ? | ? | 1,3 | |
| OnM(Pleiotropic) | ? | + | + | ? | 1,3 | |
| LIF(Pleiotropic) | ? | + | + | ? | 1,3 | |
| CNTF(Pleiotropic) | −/+ | + | + | ? | 1,3 | |
| G-CSF(Pleiotropic) | ? | + | ? | ? | 1,3 | |
| IL-12(Pleiotropic) | + | − | + | + | 1,3 | |
| g-C family | | | | | | |
| IL-2 (lymphocytes) | − | + | − | + | 1,3,5 | GAS |
| IL-4 (lymph/myeloid) | − | + | − | + | 6 | GAS (IRF1 = IFP >> Ly6)(IgH) |
| IL-7 (lymphocytes) | − | + | − | + | 5 | GAS |
| IL-9 (lymphocytes) | − | + | − | + | 5 | GAS |
| IL-13 (lymphocyte) | − | + | ? | ? | 6 | GAS |
| IL-15 | ? | + | ? | + | 5 | GAS |
| gp140 family | | | | | | |
| IL-3 (myeloid) | − | − | + | − | 5 | GAS (IRF1 > IFP >> Ly6) |
| IL-5 (myeloid) | − | − | + | − | 5 | GAS |
| GM-CSF (myeloid) | − | − | + | − | 5 | GAS |
| Growth hormone family | | | | | | |
| GH | ? | − | + | − | 5 | |
| PRL | ? | +/− | + | − | 1,3,5 | |
| EPO | ? | − | + | − | 5 | GAS (B − CAS > IRF1 = IFP >> Ly6) |
| Receptor Tyrosine Kinases | | | | | | |
| EGF | ? | + | + | − | 1,3 | GAS (IRF1) |
| PDGF | ? | + | + | − | 1,3 | |
| CSF-1 | ? | + | + | − | 1,3 | GAS (not IRF1) |

[1191] To construct a synthetic GAS containing promoter element, which is used in the Biological Assays described in Examples 32-33, a PCR based strategy is employed to generate a GAS-SV40 promoter sequence. The 5′ primer contains four tandem copies of the GAS binding site found in the IRF1 promoter and previously demonstrated to bind STATs upon induction with a range of cytokines (Rothman et al., Immunity 1:457-468 (1994).), although other GAS or ISRE elements can be used instead. The 5′ primer also contains 18bp of sequence complementary to the SV40 early promoter sequence and is flanked with an XhoI site. The sequence of the 5′ primer is:

| | |
|---|---|
| 5′:GCGCCTCGAGATTTCCCCGAAATCTAGATTTCC | (SEQ ID NO: 3) |
| CCGAAATGATTTCCCCGAAATGATTTCCCCGAAATA | |
| TCTGCCATCTCAATTAG:3′ | |

[1192] The downstream primer is complementary to the SV40 promoter and is flanked with a Hind III site: 5′:GCGGCAAGCTTTTTGCAAAGCCTAGGC:3′ (SEQ ID NO: 4)

[1193] PCR amplification is performed using the SV40 promoter template present in the B-gal:promoter plasmid obtained from Clontech. The resulting PCR fragment is digested with XhoI/Hind III and subcloned into BLSK2-. (Stratagene.) Sequencing with forward and reverse primers confirms that the insert contains the following sequence:

| | |
|---|---|
| 5′:CTCGAGATTTCCCCGAAATCTAGATTTCCCCGAAATGATTTCCCCGAAATGAT | (SEQ ID NO: 5) |
| TTCCCCGAAATATCTGCCATCTCAATTAGTCAGCAACCATAGTCCCGCCCCTAA | |
| CTCCGCCCATCCCGCCCCTAACTCCGCCCAGTTCCGCCCATTCTCCGCCCCATGG | |
| CTGACTAATTTTTTTTATTTATGCAGAGGCCGAGGCCGCCTCGGCCTCTGAGCTA | |
| TTCCAGAAGTAGTGAGGAGGCTTTTTTGGAGGCCTAGGCTTTTGCAAAAAGCTT:3′ | |

[1194] With this GAS promoter element linked to the SV40 promoter, a GAS:SEAP2 reporter construct is next engineered. Here, the reporter molecule is a secreted alkaline phosphatase, or “SEAP.” Clearly, however, any reporter molecule can be instead of SEAP, in this or in any of the other Examples. Well known reporter molecules that can be used instead of SEAP include chloramphenicol acetyltransferase (CAT), luciferase, alkaline phosphatase, B-galactosidase, green fluorescent protein (GFP), or any protein detectable by an antibody.

[1195] The above sequence confirmed synthetic GAS-SV40 promoter element is subcloned into the pSEAP-Promoter vector obtained from Clontech using HindIII and XhoI, effectively replacing the SV40 promoter with the amplified GAS:SV40 promoter element, to create the GAS-SEAP vector. However, this vector does not contain a neomycin resistance gene, and therefore, is not preferred for mammalian expression systems.

[1196] Thus, in order to generate mammalian stable cell lines expressing the GAS-SEAP reporter, the GAS-SEAP cassette is removed from the GAS-SEAP vector using SalI and NotI, and inserted into a backbone vector containing the neomycin resistance gene, such as pGFP-1 (Clontech), using these restriction sites in the multiple cloning site, to create the GAS-SEAP/Neo vector. Once this vector is transfected into mammalian cells, this vector can then be used as a reporter molecule for GAS binding as described in Examples 32-33.

[1197] Other constructs can be made using the above description and replacing GAS with a different promoter sequence. For example, construction of reporter molecules containing EGR and NF-KB promoter sequences are described in Examples 34 and 35. However, many other promoters can be substituted using the protocols described in these Examples. For instance, SRE, IL-2, NFAT, or Osteocalcin promoters can be substituted, alone or in combination (e.g., GAS/NF-KB/EGR, GAS/NF-KB, Il-2/NFAT, or NF-KB/GAS). Similarly, other cell lines can be used to test reporter construct activity, such as HELA (epithelial), HUVEC (endothelial), Reh (B-cell), Saos-2 (osteoblast), HUVAC (aortic), or Cardiomyocyte.

### Example 32

### High-throughput Screening Assay for T-cell Activity

[1198] The following protocol is used to assess T-cell activity by identifying factors, and determining whether supernate containing a polypeptide of the invention proliferates and/or differentiates T-cells. T-cell activity is assessed using the GAS/SEAP/Neo construct produced in Example 31. Thus, factors that increase SEAP activity indicate the ability to activate the Jaks-STATS signal transduction pathway. The T-cell used in this assay is Jurkat T-cells (ATCC Accession No. TIB-152), although Molt-3 cells (ATCC Accession No. CRL-1552) and Molt-4 cells (ATCC Accession No. CRL-1582) cells can also be used.

[1199] Jurkat T-cells are lymphoblastic CD4+ Th1 helper cells. In order to generate stable cell lines, approximately 2 million Jurkat cells are transfected with the GAS-SEAP/neo vector using DMRIE-C (Life Technologies)(transfection procedure described below). The transfected cells are seeded to a density of approximately 20,000 cells per well and transfectants resistant to 1 mg/ml genticin selected. Resistant colonies are expanded and then tested for their response to increasing concentrations of interferon gamma. The dose response of a selected clone is demonstrated.

[1200] Specifically, the following protocol will yield sufficient cells for 75 wells containing 200 ul of cells. Thus, it is either scaled up, or performed in multiple to generate sufficient cells for multiple 96 well plates. Jurkat cells are maintained in RPMI+10% serum with 1%Pen-Strep. Combine 2.5 mls of OPTI-MEM (Life Technologies) with 10 ug of plasmid DNA in a T25 flask. Add 2.5 ml OPTI-MEM containing 50 ul of DMRIE-C and incubate at room temperature for 15-45 mins.

[1201] During the incubation period, count cell concentration, spin down the required number of cells (10⁷ per transfection), and resuspend in OPTI-MEM to a final concentration of 10⁷ cells/ml. Then add 1 ml of 1×10⁷ cells in OPTI-MEM to T25 flask and incubate at 37 degree C. for 6 hrs. After the incubation, add 10 ml of RPMI+15% serum.

[1202] The Jurkat:GAS-SEAP stable reporter lines are maintained in RPMI +10% serum, 1 mg/ml Genticin, and 1% Pen-Strep. These cells are treated with supernatants containing polypeptide of the present invention or polypeptide of the present invention induced polypeptides as produced by the protocol described in Example 30.

[1203] On the day of treatment with the supernatant, the cells should be washed and resuspended in fresh RPMI+10% serum to a density of 500,000 cells per ml. The exact number of cells required will depend on the number of supernatants being screened. For one 96 well plate, approximately 10 million cells (for 10 plates, 100 million cells) are required.

[1204] Transfer the cells to a triangular reservoir boat, in order to dispense the cells into a 96 well dish, using a 12 channel pipette. Using a 12 channel pipette, transfer 200 ul of cells into each well (therefore adding 100,000 cells per well).

[1205] After all the plates have been seeded, 50 ul of the supernatants are transferred directly from the 96 well plate containing the supernatants into each well using a 12 channel pipette. In addition, a dose of exogenous interferon gamma (0.1, 1.0, 10 ng) is added to wells H9, H10, and H 11 to serve as additional positive controls for the assay.

[1206] The 96 well dishes containing Jurkat cells treated with supernatants are placed in an incubator for 48 hrs (note: this time is variable between 48-72 hrs). 35 ul samples from each well are then transferred to an opaque 96 well plate using a 12 channel pipette. The opaque plates should be covered (using sellophene covers) and stored at −20 degree C. until SEAP assays are performed according to Example 36. The plates containing the remaining treated cells are placed at 4 degree C. and serve as a source of material for repeating the assay on a specific well if desired.

[1207] As a positive control, 100 Unit/ml interferon gamma can be used which is known to activate Jurkat T cells. Over 30 fold induction is typically observed in the positive control wells.

[1208] The above protocol may be used in the generation of both transient, as well as, stable transfected cells, which would be apparent to those of skill in the art.

### Example 33

### High-throughput Screening Assay Identifying Myeloid Activity

[1209] The following protocol is used to assess myeloid activity of polypeptide of the present invention by determining whether polypeptide of the present invention proliferates and/or differentiates myeloid cells. Myeloid cell activity is assessed using the GAS/SEAP/Neo construct produced in Example 31. Thus, factors that increase SEAP activity indicate the ability to activate the Jaks-STATS signal transduction pathway. The myeloid cell used in this assay is U937, a pre-monocyte cell line, although TF-1, HL60, or KG1 can be used.

[1210] To transiently transfect U937 cells with the GAS/SEAP/Neo construct produced in Example 31, a DEAE-Dextran method (Kharbanda et. al., 1994, Cell Growth & Differentiation, 5:259-265) is used. First, harvest 2×10⁷ U937 cells and wash with PBS. The U937 cells are usually grown in RPMI 1640 medium containing 10% heat-inactivated fetal bovine serum (FBS) supplemented with 100 units/ml penicillin and 100 mg/ml streptomycin.

[1211] Next, suspend the cells in 1 ml of 20 mM Tris-HCl (pH 7.4) buffer containing 0.5 mg/ml DEAE-Dextran, 8 ug GAS-SEAP2 plasmid DNA, 140 mM NaCl, 5 mM KCl, 375 uM Na₂HPO₄.7H₂O, 1 mM MgCl₂, and 675 uM CaCl₂. Incubate at 37 degrees C. for 45 min.

[1212] Wash the cells with RPMI 1640 medium containing 10% FBS and then resuspend in 10 ml complete medium and incubate at 37 degree C. for 36 hr.

[1213] The GAS-SEAP/U937 stable cells are obtained by growing the cells in 400 ug/ml G418. The G418-free medium is used for routine growth but every one to two months, the cells should be re-grown in 400 ug/ml G418 for couple of passages.

[1214] These cells are tested by harvesting 1×10⁸ cells (this is enough for ten 96-well plates assay) and wash with PBS. Suspend the cells in 200 ml above described growth medium, with a final density of 5×10⁵ cells/ml. Plate 200 ul cells per well in the 96-well plate (or 1×10⁵ cells/well).

[1215] Add 50 ul of the supernatant prepared by the protocol described in Example 30. Incubate at 37 degee C for 48 to 72 hr. As a positive control, 100 Unit/ml interferon gamma can be used which is known to activate U937 cells. Over 30 fold induction is typically observed in the positive control wells. SEAP assay the supernatant according to the protocol described in Example 36.

### Example 34

### High-throughput Screening Assay Identifying Neuronal Activity

[1216] When cells undergo differentiation and proliferation, a group of genes are activated through many different signal transduction pathways. One of these genes, EGR1 (early growth response gene 1), is induced in various tissues and cell types upon activation. The promoter of EGR1 is responsible for such induction. Using the EGRl promoter linked to reporter molecules, activation of cells can be assessed by polypeptide of the present invention.

[1217] Particularly, the following protocol is used to assess neuronal activity in PC12 cell lines. PC12 cells (rat phenochromocytoma cells) are known to proliferate and/or differentiate by activation with a number of mitogens, such as TPA (tetradecanoyl phorbol acetate), NGF (nerve growth factor), and EGF (epidermal growth factor). The EGR1 gene expression is activated during this treatment. Thus, by stably transfecting PC12 cells with a construct containing an EGR promoter linked to SEAP reporter, activation of PC12 cells by polypeptide of the present invention can be assessed.

[1218] The EGR/SEAP reporter construct can be assembled by the following protocol. The EGR-1 promoter sequence (−633 to +1)(Sakamoto K et al., Oncogene 6:867-871 (1991)) can be PCR amplified from human genomic DNA using the following primers: 5′ GCGCTCGAGGGATGACAGCGATAGAACCCCGG-3′ (SEQ ID NO: 6) 5′ GCGAAGCTTCGCGACTCCCCGGATCCGCCTC-3′ (SEQ ID NO: 7)

[1219] Using the GAS:SEAP/Neo vector produced in Example 31, EGRI amplified product can then be inserted into this vector. Linearize the GAS:SEAP/Neo vector using restriction enzymes XhoI/HindIII, removing the GAS/SV40 stuffer. Restrict the EGR1 amplified product with these same enzymes. Ligate the vector and the EGR1 promoter.

[1220] To prepare 96 well-plates for cell culture, two mls of a coating solution (1:30 dilution of collagen type I (Upstate Biotech Inc. Cat#08-115) in 30% ethanol (filter sterilized)) is added per one 10 cm plate or 50 ml per well of the 96-well plate, and allowed to air dry for 2 hr.

[1221] PC12 cells are routinely grown in RPMI-1640 medium (Bio Whittaker) containing 10% horse serum (JRH BIOSCIENCES, Cat. # 12449-78P), 5% heat-inactivated fetal bovine serum (FBS) supplemented with 100 units/ml penicillin and 100 ug/ml streptomycin on a precoated 10 cm tissue culture dish. One to four split is done every three to four days. Cells are removed from the plates by scraping and resuspended with pipetting up and down for more than 15 times.

[1222] Transfect the EGR/SEAP/Neo construct into PC12 using the Lipofectamine protocol described in Example 30. EGR-SEAP/PC12 stable cells are obtained by growing the cells in 300 ug/ml G418. The G418-free medium is used for routine growth but every one to two months, the cells should be re-grown in 300 ug/ml G418 for couple of passages.

[1223] To assay for neuronal activity, a 10 cm plate with cells around 70 to 80% confluent is screened by removing the old medium. Wash the cells once with PBS (Phosphate buffered saline). Then starve the cells in low serum medium (RPMI-1640 containing 1% horse serum and 0.5% FBS with antibiotics) overnight.

[1224] The next morning, remove the medium and wash the cells with PBS. Scrape off the cells from the plate, suspend the cells well in 2 ml low serum medium. Count the cell number and add more low serum medium to reach final cell density as 5×10⁵ cells/ml.

[1225] Add 200 ul of the cell suspension to each well of 96-well plate (equivalent to 1×10⁵ cells/well). Add 50 ul supernatant produced by Example 30, 37 degree C. for 48 to 72 hr. As a positive control, a growth factor known to activate PC12 cells through EGR can be used, such as 50 ng/ul of Neuronal Growth Factor (NGF). Over fifty-fold induction of SEAP is typically seen in the positive control wells. SEAP assay the supernatant according to Example 36.

### Example 35

### High-throughput Screening Assay for T-cell Activity

[1226] NF-KB (Nuclear Factor KB) is a transcription factor activated by a wide variety of agents including the inflammatory cytokines IL-1 and TNF, CD30 and CD40, lymphotoxin-alpha and lymphotoxin-beta, by exposure to LPS or thrombin, and by expression of certain viral gene products. As a transcription factor, NF-KB regulates the expression of genes involved in immune cell activation, control of apoptosis (NF-KB appears to shield cells from apoptosis), B and T-cell development, anti-viral and antimicrobial responses, and multiple stress responses.

[1227] In non-stimulated conditions, NF-KB is retained in the cytoplasm with I-KB (Inhibitor KB). However, upon stimulation, I-KB is phosphorylated and degraded, causing NF-KB to shuttle to the nucleus, thereby activating transcription of target genes. Target genes activated by NF-KB include IL-2, IL-6, GM-CSF, ICAM-1 and class 1 MHC.

[1228] Due to its central role and ability to respond to a range of stimuli, reporter constructs utilizing the NF-KB promoter element are used to screen the supernatants produced in Example 30. Activators or inhibitors of NF-KB would be useful in treating, preventing, and/or diagnosing diseases. For example, inhibitors of NF-KB could be used to treat those diseases related to the acute or chronic activation of NF-KB, such as rheumatoid arthritis.

[1229] To construct a vector containing the NF-KB promoter element, a PCR based strategy is employed. The upstream primer contains four tandem copies of the NF-KB binding site (GGGGACTTTCCC) (SEQ ID NO: 8), 18 bp of sequence complementary to the 5′ end of the SV40 early promoter sequence, and is flanked with an XhoI site:

| | |
|---|---|
| 5′:GCGGCCTCGAGGGGACTTTCCCGGGGACTTTCC | (SEQ ID NO: 9) |
| GGGGACTTTCCGGGACTTTCCATCCTGCCATCTCAA | |
| TTAG:3′ | |

[1230] The downstream primer is complementary to the 3′ end of the SV40 promoter and is flanked with a Hind III site:

| | |
|---|---|
| 5′:GCGGCAAGCTTTTTGCAAAGCCTAGGC:3′ | (SEQ ID NO: 4) |

[1231] PCR amplification is performed using the SV40 promoter template present in the pB-gal:promoter plasmid obtained from Clontech. The resulting PCR fragment is digested with XhoI and Hind III and subcloned into BLSK2-. (Stratagene) Sequencing with the T7 and T3 primers confirms the insert contains the following sequence:

| | |
|---|---|
| 5′:CTCGAGGGGACTTTCCCGGGGACTTTCCGGGGACTTTCCGGGACTTTCCATCT | (SEQ ID NO: 10) |
| GCCATCTCAATTAGTCAGCAACCATAGTCCCGCCCCTAACTCCGCCCATCCCGC | |
| CCCTAACTCCGCCCAGTTCCGCCCATTCTCCGCCCCATGGCTGACTAATTTTTTT | |
| TATTTATGCAGAGGCCGAGGCCGCCTCGGCCTCTGAGCTATTCCAGAAGTAGTG | |
| AGGAGGCTTTTTTGGAGGCCTAGGCTTTTGCAAAAAGCTT:3′ | |

[1232] Next, replace the SV40 minimal promoter element present in the pSEAP2-promoter plasmid (Clontech) with this NF-KB/SV40 fragment using XhoI and HindIII. However, this vector does not contain a neomycin resistance gene, and therefore, is not preferred for mammalian expression systems.

[1233] In order to generate stable mammalian cell lines, the NF-KB/SV40/SEAP cassette is removed from the above NF-KB/SEAP vector using restriction enzymes SalI and NotI, and inserted into a vector containing neomycin resistance. Particularly, the NF-KB/SV40/SEAP cassette was inserted into pGFP-1 (Clontech), replacing the GFP gene, after restricting pGFP-1 with SalI and NotI.

[1234] Once NF-KB/SV40/SEAP/Neo vector is created, stable Jurkat T-cells are created and maintained according to the protocol described in Example 32. Similarly, the method for assaying supernatants with these stable Jurkat T-cells is also described in Example 32. As a positive control, exogenous TNF alpha (0.1,1, 10 ng) is added to wells H9, H10, and H11, with a 5-10 fold activation typically observed.

### Example 36

### Assay for SEAP Activity

[1235] As a reporter molecule for the assays described in Examples 32-35, SEAP activity is assayed using the Tropix Phospho-light Kit (Cat. BP-400) according to the following general procedure. The Tropix Phospho-light Kit supplies the Dilution, Assay, and Reaction Buffers used below.

[1236] Prime a dispenser with the 2.5× Dilution Buffer and dispense 15 ul of 2.5× dilution buffer into Optiplates containing 35 ul of a supernatant. Seal the plates with a plastic sealer and incubate at 65 degree C. for 30 min. Separate the Optiplates to avoid uneven heating.

[1237] Cool the samples to room temperature for 15 minutes. Empty the dispenser and prime with the Assay Buffer. Add 50 ml Assay Buffer and incubate at room temperature 5 min. Empty the dispenser and prime with the Reaction Buffer (see the Table below). Add 50 ul Reaction Buffer and incubate at room temperature for 20 minutes. Since the intensity of the chemiluminescent signal is time dependent, and it takes about 10 minutes to read 5 plates on a luminometer, thus one should treat 5 plates at each time and start the second set 10 minutes later.

[1238] Read the relative light unit in the luminometer. Set H12 as blank, and print the results. An increase in chemiluminescence indicates reporter activity.

Reaction Buffer Formulation:

| # of plates | Rxn buffer diluent (ml) | CSPD (ml) |
|---|---|---|
| 10 | 60 | 3 |
| 11 | 65 | 3.25 |
| 12 | 70 | 3.5 |
| 13 | 75 | 3.75 |
| 14 | 80 | 4 |
| 15 | 85 | 4.25 |
| 16 | 90 | 4.5 |
| 17 | 95 | 4.75 |
| 18 | 100 | 5 |
| 19 | 105 | 5.25 |
| 20 | 110 | 5.5 |
| 21 | 115 | 5.75 |
| 22 | 120 | 6 |
| 23 | 125 | 6.25 |
| 24 | 130 | 6.5 |
| 25 | 135 | 6.75 |
| 26 | 140 | 7 |
| 27 | 145 | 7.25 |
| 28 | 150 | 7.5 |
| 29 | 155 | 7.75 |
| 30 | 160 | 8 |
| 31 | 165 | 8.25 |
| 32 | 170 | 8.5 |
| 33 | 175 | 8.75 |
| 34 | 180 | 9 |
| 35 | 185 | 9.25 |
| 36 | 190 | 9.5 |
| 37 | 195 | 9.75 |
| 38 | 200 | 10 |
| 39 | 205 | 10.25 |
| 40 | 210 | 10.5 |
| 41 | 215 | 10.75 |
| 42 | 220 | 11 |
| 43 | 225 | 11.25 |
| 44 | 230 | 11.5 |
| 45 | 235 | 11.75 |
| 46 | 240 | 12 |
| 47 | 245 | 12.25 |
| 48 | 250 | 12.5 |
| 49 | 255 | 12.75 |
| 50 | 260 | 13 |

### Example 37

### High-throughput Screening Assay Identifying Changes in Small Molecule Concentration and Membrane Permeability

[1239] Binding of a ligand to a receptor is known to alter intracellular levels of small molecules, such as calcium, potassium, sodium, and pH, as well as alter membrane potential. These alterations can be measured in an assay to identify supernatants which bind to receptors of a particular cell. Although the following protocol describes an assay for calcium, this protocol can easily be modified to detect changes in potassium, sodium, pH, membrane potential, or any other small molecule which is detectable by a fluorescent probe.

[1240] The following assay uses Fluorometric Imaging Plate Reader (“FLIPR”) to measure changes in fluorescent molecules (Molecular Probes) that bind small molecules. Clearly, any fluorescent molecule detecting a small molecule can be used instead of the calcium fluorescent molecule, fluo-4 (Molecular Probes, Inc.; catalog no. F-14202), used here.

[1241] For adherent cells, seed the cells at 10,000-20,000 cells/well in a Co-star black 96-well plate with clear bottom. The plate is incubated in a CO₂ incubator for 20 hours. The adherent cells are washed two times in Biotek washer with 200 ul of HBSS (Hank's Balanced Salt Solution) leaving 100 ul of buffer after the final wash.

[1242] A stock solution of 1 mg/ml fluo-4 is made in 10% pluronic acid DMSO. To load the cells with fluo-4, 50 ul of 12 ug/ml fluo-4 is added to each well. The plate is incubated at 37 degrees C. in a CO₂ incubator for 60 min. The plate is washed four times in the Biotek washer with HBSS leaving 100 ul of buffer.

[1243] For non-adherent cells, the cells are spun down from culture media. Cells are re-suspended to 2-5×10⁶ cells/ml with HBSS in a 50-ml conical tube. 4 ul of 1 mg/ml fluo-4 solution in 10% pluronic acid DMSO is added to each ml of cell suspension. The tube is then placed in a 37 degrees C. water bath for 30-60 min. The cells are washed twice with HBSS, resuspended to 1×10⁶ cells/ml, and dispensed into a microplate, 100 ul/well. The plate is centrifuged at 1000 rpm for 5 min. The plate is then washed once in Denley Cell Wash with 200 ul, followed by an aspiration step to 100 ul final volume.

[1244] For a non-cell based assay, each well contains a fluorescent molecule, such as fluo-4 . The supernatant is added to the well, and a change in fluorescence is detected.

[1245] To measure the fluorescence of intracellular calcium, the FLIPR is set for the following parameters: (1) System gain is 300-800 mW; (2) Exposure time is 0.4 second; (3) Camera F/stop is F/2; (4) Excitation is 488 nm; (5) Emission is 530 nm; and (6) Sample addition is 50 ul. Increased emission at 530 nm indicates an extracellular signaling event caused by the a molecule, either polypeptide of the present invention or a molecule induced by polypeptide of the present invention, which has resulted in an increase in the intracellular Ca⁺⁺ concentration.

### Example 38

### High-throughput Screening Assay Identifying Tyrosine Kinase Activity

[1246] The Protein Tyrosine Kinases (PTK) represent a diverse group of transmembrane and cytoplasmic kinases. Within the Receptor Protein Tyrosine Kinase RPTK) group are receptors for a range of mitogenic and metabolic growth factors including the PDGF, FGF, EGF, NGF, HGF and Insulin receptor subfamilies. In addition there are a large family of RPTKs for which the corresponding ligand is unknown. Ligands for RPTKs include mainly secreted small proteins, but also membrane-bound and extracellular matrix proteins.

[1247] Activation of RPTK by ligands involves ligand-mediated receptor dimerization, resulting in transphosphorylation of the receptor subunits and activation of the cytoplasmic tyrosine kinases. The cytoplasmic tyrosine kinases include receptor associated tyrosine kinases of the src-family (e.g., src, yes, lck, lyn, fyn) and non-receptor linked and cytosolic protein tyrosine kinases, such as the Jak family, members of which mediate signal transduction triggered by the cytokine superfamily of receptors (e.g., the Interleukins, Interferons, GM-CSF, and Leptin).

[1248] Because of the wide range of known factors capable of stimulating tyrosine kinase activity, identifying whether polypeptide of the present invention or a molecule induced by polypeptide of the present invention is capable of activating tyrosine kinase signal transduction pathways is of interest. Therefore, the following protocol is designed to identify such molecules capable of activating the tyrosine kinase signal transduction pathways.

[1249] Seed target cells (e.g., primary keratinocytes) at a density of approximately 25,000 cells per well in a 96 well Loprodyne Silent Screen Plates purchased from Nalge Nunc (Naperville, Ill.). The plates are sterilized with two 30 minute rinses with 100% ethanol, rinsed with water and dried overnight. Some plates are coated for 2 hr with 100 ml of cell culture grade type I collagen (50 mg/ml), gelatin (2%) or polylysine (50 mg/ml), all of which can be purchased from Sigma Chemicals (St. Louis, Mo.) or 10% Matrigel purchased from Becton Dickinson (Bedford, Mass.), or calf serum, rinsed with PBS and stored at 4 degree C. Cell growth on these plates is assayed by seeding 5,000 cells/well in growth medium and indirect quantitation of cell number through use of alamarBlue as described by the manufacturer Alamar Biosciences, Inc. (Sacramento, Calif.) after 48 hr. Falcon plate covers #3071 from Becton Dickinson (Bedford, Mass.) are used to cover the Loprodyne Silent Screen Plates. Falcon Microtest III cell culture plates can also be used in some proliferation experiments.

[1250] To prepare extracts, A431 cells are seeded onto the nylon membranes of Loprodyne plates (20,000/200 ml/well) and cultured overnight in complete medium. Cells are quiesced by incubation in serum-free basal medium for 24 hr. After 5-20 minutes treatment with EGF (60 ng/ml) or 50 ul of the supernatant produced in Example 30, the medium was removed and 100 ml of extraction buffer ((20 mM HEPES pH 7.5, 0.15 M NaCl, 1% Triton X-100, 0.1% SDS, 2 mM Na3VO4, 2 mM Na4P2O7 and a cocktail of protease inhibitors (# 1836170) obtained from Boeheringer Mannheim (Indianapolis, Ind.)) is added to each well and the plate is shaken on a rotating shaker for 5 minutes at 4° C. The plate is then placed in a vacuum transfer manifold and the extract filtered through the 0.45 mm membrane bottoms of each well using house vacuum. Extracts are collected in a 96-well catch/assay plate in the bottom of the vacuum manifold and immediately placed on ice. To obtain extracts clarified by centrifugation, the content of each well, after detergent solubilization for 5 minutes, is removed and centrifuged for 15 minutes at 4 degree C. at 16,000× g.

[1251] Test the filtered extracts for levels of tyrosine kinase activity. Although many methods of detecting tyrosine kinase activity are known, one method is described here.

[1252] Generally, the tyrosine kinase activity of a supernatant is evaluated by determining its ability to phosphorylate a tyrosine residue on a specific substrate (a biotinylated peptide). Biotinylated peptides that can be used for this purpose include PSK1 (corresponding to amino acids 6-20 of the cell division kinase cdc2-p34) and PSK2 (corresponding to amino acids 1-17 of gastrin). Both peptides are substrates for a range of tyrosine kinases and are available from Boehringer Mannheim.

[1253] The tyrosine kinase reaction is set up by adding the following components in order. First, add 10 ul of 5 uM Biotinylated Peptide, then 10 ul ATP/Mg₂₊ (5 mM ATP/50 mM MgCl₂), then 10 ul of 5× Assay Buffer (4OmM imidazole hydrochloride, pH7.3, 40 mM beta-glycerophosphate, 1 mM EGTA, lOOmM MgCl₂, 5 mM MnCl₂, 0.5 mg/ml BSA), then 5 ul of Sodium Vanadate (1 mM), and then 5 ul of water. Mix the components gently and preincubate the reaction mix at 30 degree C. for 2 min. Initial the reaction by adding 10 ul of the control enzyme or the filtered supernatant.

[1254] The tyrosine kinase assay reaction is then terminated by adding 10 ul of 120 mm EDTA and place the reactions on ice.

[1255] Tyrosine kinase activity is determined by transferring 50 ul aliquot of reaction mixture to a microtiter plate (MTP) module and incubating at 37 degree C. for 20 min. This allows the streptavidin coated 96 well plate to associate with the biotinylated peptide. Wash the MTP module with 300 ul/well of PBS four times. Next add 75 ul of anti-phospotyrosine antibody conjugated to horse radish peroxidase(anti-P-Tyr-POD(0.5 u/ml)) to each well and incubate at 37 degree C. for one hour. Wash the well as above.

[1256] Next add 10 ul of peroxidase substrate solution (Boehringer Mannheim) and incubate at room temperature for at least 5 mins (up to 30 min). Measure the absorbance of the sample at 405 nm by using ELISA reader. The level of bound peroxidase activity is quantitated using an ELISA reader and reflects the level of tyrosine kinase activity.

### Example 39

### High-throughput Screening Assay Identifying Phosphorylation Activity

[1257] As a potential alternative and/or complement to the assay of protein tyrosine kinase activity described in Example 38, an assay which detects activation (phosphorylation) of major intracellular signal transduction intermediates can also be used. For example, as described below one particular assay can detect tyrosine phosphorylation of the Erk-1 and Erk-2 kinases. However, phosphorylation of other molecules, such as Raf, JNK, p38 MAP, Map kinase kinase (MEK), MEK kinase, Src, Muscle specific kinase (MuSK), IRAK, Tec, and Janus, as well as any other phosphoserine, phosphotyrosine, or phosphothreonine molecule, can be detected by substituting these molecules for Erk-1 or Erk-2 in the following assay.

[1258] Specifically, assay plates are made by coating the wells of a 96-well ELISA plate with 0.1 ml of protein G (lug/ml) for 2 hr at room temp, (RT). The plates are then rinsed with PBS and blocked with 3% BSA/PBS for 1 hr at RT. The protein G plates are then treated with 2 commercial monoclonal antibodies (100 ng/well) against Erk-1 and Erk-2 (1 hr at RT) (Santa Cruz Biotechnology). (To detect other molecules, this step can easily be modified by substituting a monoclonal antibody detecting any of the above described molecules.) After 3-5 rinses with PBS, the plates are stored at 4 degree C. until use.

[1259] A431 cells are seeded at 20,000/well in a 96-well Loprodyne filterplate and cultured overnight in growth medium. The cells are then starved for 48 hr in basal medium (DMEM) and then treated with EGF (6 ng/well) or 50 ul of the supernatants obtained in Example 30 for 5-20 minutes. The cells are then solubilized and extracts filtered directly into the assay plate.

[1260] After incubation with the extract for 1 hr at RT, the wells are again rinsed. As a positive control, a commercial preparation of MAP kinase (10 ng/well) is used in place of A431 extract. Plates are then treated with a commercial polyclonal (rabbit) antibody (1 ug/ml) which specifically recognizes the phosphorylated epitope of the Erk-1 and Erk-2 kinases (1 hr at RT). This antibody is biotinylated by standard procedures. The bound polyclonal antibody is then quantitated by successive incubations with Europium-streptavidin and Europium fluorescence enhancing reagent in the Wallac DELFIA instrument (time-resolved fluorescence). An increased fluorescent signal over background indicates a phosphorylation by polypeptide of the present invention or a molecule induced by polypeptide of the present invention.

### Example 40

### Assay for the Stimulation of Bone Marrow CD34+ Cell Proliferation

[1261] This assay is based on the ability of human CD34+ to proliferate in the presence of hematopoietic growth factors and evaluates the ability of isolated polypeptides expressed in mammalian cells to stimulate proliferation of CD34+ cells.

[1262] It has been previously shown that most mature precursors will respond to only a single signal. More immature precursors require at least two signals to respond. Therefore, to test the effect of polypeptides on hematopoietic activity of a wide range of progenitor cells, the assay contains a given polypeptide in the presence or absence of other hematopoietic growth factors. Isolated cells are cultured for 5 days in the presence of Stem Cell Factor (SCF) in combination with tested sample. SCF alone has a very limited effect on the proliferation of bone marrow (BM) cells, acting in such conditions only as a “survival” factor. However, combined with any factor exhibiting stimulatory effect on these cells (e.g., IL-3), SCF will cause a synergistic effect. Therefore, if the tested polypeptide has a stimulatory effect on hematopoietic progenitors, such activity can be easily detected. Since normal BM cells have a low level of cycling cells, it is likely that any inhibitory effect of a given polypeptide, or agonists or antagonists thereof, might not be detected. Accordingly, assays for an inhibitory effect on progenitors is preferably tested in cells that are first subjected to in vitro stimulation with SCF+IL+3, and then contacted with the compound that is being evaluated for inhibition of such induced proliferation.

[1263] Briefly, CD34+ cells are isolated using methods known in the art. The cells are thawed and resuspended in medium (QBSF 60 serum-free medium with 1% L-glutamine (500 ml) Quality Biological, Inc., Gaithersburg, Md. Cat# 160-204-101). After several gentle centrifugation steps at 200× g, cells are allowed to rest for one hour. The cell count is adjusted to 2.5×105 cells/ml. During this time, 100 μl of sterile water is added to the peripheral wells of a 96-well plate. The cytokines that can be tested with a given polypeptide in this assay is rhSCF (R&D Systems, Minneapolis, MN, Cat# 255-SC) at 50 ng/ml alone and in combination with rhSCF and rhIL-3 (R&D Systems, Minneapolis, MN, Cat# 203-ML) at 30 ng/ml. After one hour, 10 μl of prepared cytokines, 50 μl of the supernatants prepared in Example 30 (supernatants at 1:2 dilution =50 μl) and 20 μl of diluted cells are added to the media which is already present in the wells to allow for a final total volume of 100 μl. The plates are then placed in a 37° C./5% CO₂ incubator for five days.

[1264] Eighteen hours before the assay is harvested, 0.5 μCi/well of [3H] Thymidine is added in a 10 μl volume to each well to determine the proliferation rate. The experiment is terminated by harvesting the cells from each 96-well plate to a filtermat using the Tomtec Harvester 96. After harvesting, the filtermats are dried, trimmed and placed into OmniFilter assemblies consisting of one OmniFilter plate and one OmniFilter Tray. 60 μl Microscint is added to each well and the plate sealed with TopSeal-A press-on sealing film A bar code 15 sticker is affixed to the first plate for counting. The sealed plates are then loaded and the level of radioactivity determined via the Packard Top Count and the printed data collected for analysis. The level of radioactivity reflects the amount of cell proliferation.

[1265] The studies described in this example test the activity of a given polypeptide to stimulate bone marrow CD34+ cell proliferation. One skilled in the art could easily modify the exemplified studies to test the activity of polynucleotides (e.g., gene therapy), antibodies, agonists, and/or antagonists and fragments and variants thereof. As a nonlimiting example, potential antagonists tested in this assay would be expected to inhibit cell proliferation in the presence of cytokines and/or to increase the inhibition of cell proliferation in the presence of cytokines and a given polypeptide. In contrast, potential agonists tested in this assay would be expected to enhance cell proliferation and/or to decrease the inhibition of cell proliferation in the presence of cytokines and a given polypeptide.

[1266] The ability of a gene to stimulate the proliferation of bone marrow CD34+ cells indicates that polynucleotides and polypeptides corresponding to the gene are useful for the diagnosis and treatment of disorders affecting the immune system and hematopoiesis. Representative uses are described in the “Immune Activity” and “Infectious Disease” sections above, and elsewhere herein.

### Example 41

### Assay for Extracellular Matrix Enhanced Cell Response (EMECR)

[1267] The objective of the Extracellular Matrix Enhanced Cell Response (EMECR) assay is to identify gene products (e.g., isolated polypeptides) that act on the hematopoietic stem cells in the context of the extracellular matrix (ECM) induced signal.

[1268] Cells respond to the regulatory factors in the context of signal(s) received from the surrounding microenvironment. For example, fibroblasts, and endothelial and epithelial stem cells fail to replicate in the absence of signals from the ECM. Hematopoietic stem cells can undergo self-renewal in the bone marrow, but not in in vitro suspension culture. The ability of stem cells to undergo self-renewal in vitro is dependent upon their interaction with the stromal cells and the ECM protein fibronectin (fn). Adhesion of cells to fn is mediated by the α₅.β₁ and α₄.β₁ integrin receptors, which are expressed by human and mouse hematopoietic stem cells. The factor(s) which integrate with the ECM environment and are responsible for stimulating stem cell self-renewal havea not yet been identified. Discovery of such factors should be of great interest in gene therapy and bone marrow transplant applications.

[1269] Briefly, polystyrene, non tissue culture treated, 96-well plates are coated with fn fragment at a coating concentration of 0.2 μg/ cm. Mouse bone marrow cells are plated (1,000 cells/well) in 0.2 ml of serum-free medium. Cells cultured in the presence of IL-3 ( 5 ng/ml )+SCF (50 ng/ml ) would serve as the positive control, conditions under which little self-renewal but pronounced differentiation of the stem cells is to be expected. Gene products of the invention (e.g., including, but not limited to, polynucleotides and polypeptides of the present invention, and supernatants produced in Example 30), are tested with appropriate negative controls in the presence and absence of SCF (5.0 ng/ml), where test factor supernatants represent 10% of the total assay volume. The plated cells are then allowed to grow by incubating in a low oxygen environment (5% CO₂, 7% O₂, and 88% N₂ ) tissue culture incubator for 7 days. The number of proliferating cells within the wells is then quantitated by measuring thymidine incorporation into cellular DNA. Verification of the positive hits in the assay will require phenotypic characterization of the cells, which can be accomplished by scaling up of the culture system and using appropriate antibody reagents against cell surface antigens and FACScan.

[1270] One skilled in the art could easily modify the exemplified studies to test the activity of polynucleotides (e.g., gene therapy), antibodies, agonists, and/or antagonists and fragments and variants thereof.

[1271] If a particular polypeptide of the present invention is found to be a stimulator of hematopoietic progenitors, polynucleotides and polypeptides corresponding to the gene encoding said polypeptide may be useful for the diagnosis and treatment of disorders affecting the immune system and hematopoiesis. Representative uses are described in the “Immune Activity” and “Infectious Disease” sections above, and elsewhere herein. The gene product may also be useful in the expansion of stem cells and committed progenitors of various blood lineages, and in the differentiation and/or proliferation of various cell types.

[1272] Additionally, the polynucleotides and/or polypeptides of the gene of interest and/or agonists and/or antagonists thereof, may also be employed to inhibit the proliferation and differentiation of hematopoietic cells and therefore may be employed to protect bone marrow stem cells from chemotherapeutic agents during chemotherapy. This antiproliferative effect may allow administration of higher doses of chemotherapeutic agents and, therefore, more effective chemotherapeutic treatment.

[1273] Moreover, polynucleotides and polypeptides corresponding to the gene of interest may also be useful for the treatment and diagnosis of hematopoietic related disorders such as, for example, anemia, pancytopenia, leukopenia, thrombocytopenia or leukemia since stromal cells are important in the production of cells of hematopoietic lineages. The uses include bone marrow cell ex-vivo culture, bone marrow transplantation, bone marrow reconstitution, radiotherapy or chemotherapy of neoplasia.

### Example 42

### Human Dermal Fibroblast and Aortic Smooth Muscle Cell Proliferation

[1274] The polypeptide of interest is added to cultures of normal human dermal fibroblasts (NHDF) and human aortic smooth muscle cells (AoSMC) and two co-assays are performed with each sample. The first assay examines the effect of the polypeptide of interest on the proliferation of normal human dermal fibroblasts (NHDF) or aortic smooth muscle cells (AoSMC). Aberrant growth of fibroblasts or smooth muscle cells is a part of several pathological processes, including fibrosis, and restenosis. The second. assay examines IL6 production by both NHDF and SMC. IL6 production is an indication of functional activation. Activated cells will have increased production of a number of cytokines and other factors, which can result in a proinflammatory or immunomodulatory outcome. Assays are run with and without co-TNFa stimulation, in order to check for costimulatory or inhibitory activity.

[1275] Briefly, on day 1, 96-well black plates are set up with 1000 cells/well (NHDF) or 2000 cells/well (AoSMC) in 100 μl culture media. NHDF culture media contains: Clonetics FB basal media, 1 mg/ml hFGF, 5 mg/ml insulin, 50 mg/ml gentamycin, 2%FBS, while AoSMC culture media contains Clonetics SM basal media, 0.5 μg/ml hEGF, 5 mg/ml insulin, 1 μg/ml hFGF, 50 mg/ml gentamycin, 50 μg/ml Amphotericin B, 5%FBS. After incubation at 37° C. for at least 4-5 hours culture media is aspirated and replaced with growth arrest media. Growth arrest media for NHDF contains fibroblast basal media, 50 mg/ml gentamycin, 2% FBS, while growth arrest media for AoSMC contains SM basal media, 50 mg/ml gentamycin, 50 μg/ml Amphotericin B, 0.4% FBS. Incubate at 37° C. until day 2.

[1276] On day 2, serial dilutions and templates of the polypeptide of interest are designed such that they always include media controls and known-protein controls. For both stimulation and inhibition experiments, proteins are diluted in growth arrest media. For inhibition experiments, TNFa is added to a final concentration of 2 ng/ml (NHDF) or 5 ng/ml (AoSMC). Add 1/3 vol media containing controls or polypeptides of the present invention and incubate at 37 degrees C./5% CO₂ until day 5.

[1277] Transfer 60 μl from each well to another labeled 96-well plate, cover with a plate-sealer, and store at 4 degrees C. until Day 6 (for IL6 ELISA). To the remaining 100 μl in the cell culture plate, aseptically add Alamar Blue in an amount equal to 10% of the culture volume (10 μl). Return plates to incubator for 3 to 4 hours. Then measure fluorescence with excitation at 530 nm and emission at 590 nm using the CytoFluor. This yields the growth stimulation/inhibition data.

[1278] On day 5, the IL6 ELISA is performed by coating a 96 well plate with 50-100 ul/well of Anti-Human IL6 Monoclonal antibody diluted in PBS, pH 7.4, incubate ON at room temperature.

[1279] On day 6, empty the plates into the sink and blot on paper towels. Prepare Assay Buffer containing PBS with 4% BSA. Block the plates with 200 μl/well of Pierce Super Block blocking buffer in PBS for 1-2 hr and then wash plates with wash buffer (PBS, 0.05% Tween-20). Blot plates on paper towels. Then add 50 μl/well of diluted Anti-Human IL-6 Monoclonal, Biotin-labeled antibody at 0.50 mg/ml. Make dilutions of IL-6 stock in media (30, 10, 3, 1, 0.3, 0 ng/ml). Add duplicate samples to top row of plate. Cover the plates and incubate for 2 hours at RT on shaker.

[1280] Plates are washed with wash buffer and blotted on paper towels. Dilute EU-labeled Streptavidin 1:1000 in Assay buffer, and add 100 μl/well. Cover the plate and incubate 1 h at RT. Plates are again washed with wash buffer and blotted on paper towels.

[1281] Add 100 μl/well of Enhancement Solution. Shake for 5 minutes. Read the plate on the Wallac DELFIA Fluorometer. Readings from triplicate samples in each assay were tabulated and averaged.

[1282] A positive result in this assay suggests AoSMC cell proliferation and that the polypeptide of the present invention may be involved in dermal fibroblast proliferation and/or smooth muscle cell proliferation. A positive result also suggests many potential uses of polypeptides, polynucleotides, agonists and/or antagonists of the polynucleotide/polypeptide of the present invention which gives a positive result. For example, inflammation and immune responses, wound healing, and angiogenesis, as detailed throughout this specification. Particularly, polypeptides of the present invention and polynucleotides of the present invention may be used in wound healing and dermal regeneration, as well as the promotion of vasculogenesis, both of the blood vessels and lymphatics. The growth of vessels can be used in the treatment of, for example, cardiovascular diseases. Additionally, antagonists of polypeptides and polynucleotides of the invention may be useful in treating diseases, disorders, and/or conditions which involve angiogenesis by acting as an anti-vascular agent (e.g., anti-angiogenesis). These diseases, disorders, and/or conditions are known in the art and/or are described herein, such as, for example, malignancies, solid tumors, benign tumors, for example hemangiomas, acoustic neuromas, neurofibromas, trachomas, and pyogenic granulomas; artheroscleric plaques; ocular angiogenic diseases, for example, diabetic retinopathy, retinopathy of prematurity, macular degeneration, corneal graft rejection, neovascular glaucoma, retrolental fibroplasia, rubeosis, retinoblastoma, uvietis and Pterygia (abnormal blood vessel growth) of the eye; rheumatoid arthritis; psoriasis; delayed wound healing; endometriosis; vasculogenesis; granulations; hypertrophic scars (keloids); nonunion fractures; scleroderma; trachoma; vascular adhesions; myocardial angiogenesis; coronary collaterals; cerebral collaterals; arteriovenous malformations; ischemic limb angiogenesis; Osler-Webber Syndrome; plaque neovascularization; telangiectasia; hemophiliac joints; angiofibroma; fibromuscular dysplasia; wound granulation; Crohn's disease; and atherosclerosis. Moreover, antagonists of polypeptides and polynucleotides of the invention may be useful in treating anti-hyperproliferative diseases and/or anti-inflammatory known in the art and/or described herein.

[1283] One skilled in the art could easily modify the exemplified studies to test the activity of polynucleotides (e.g., gene 'therapy), antibodies, agonists, and/or antagonists and fragments and variants thereof.

### Example 43

### Cellular Adhesion Molecule (CAM) Expression on Endothelial Cells

[1284] The recruitment of lymphocytes to areas of inflammation and angiogenesis involves specific receptor-ligand interactions between cell surface adhesion molecules (CAMs) on lymphocytes and the vascular endothelium. The adhesion process, in both normal and pathological settings, follows a multi-step cascade that involves intercellular adhesion molecule-1 (ICAM-1), vascular cell adhesion molecule-1 (VCAM-1), and endothelial leukocyte adhesion molecule-1 (E-selectin) expression on endothelial cells (EC). The expression of these molecules and others on the vascular endothelium determines the efficiency with which leukocytes may adhere to the local vasculature and extravasate into the local tissue during the development of an inflammatory response. The local concentration of cytokines and growth factor participate in the modulation of the expression of these CAMs.

[1285] Briefly, endothelial cells (e.g., Human Umbilical Vein Endothelial cells (HUVECs)) are grown in a standard 96 well plate to confluence, growth medium is removed from the cells and replaced with 100 μl of 199 Medium (10% fetal bovine serum (FBS)). Samples for testing and positive or negative controls are added to the plate in triplicate (in 10 111 volumes). Plates are then incubated at 37° C. for either 5 h (selectin and integrin expression) or 24 h (integrin expression only). Plates are aspirated to remove medium and 100 μl of 0.1% paraformaldehyde-PBS (with Ca++ and Mg++) is added to each well. Plates are held at 4° C. for 30 min. Fixative is removed from the wells and wells are washed 1× with PBS(+Ca,Mg) +0.5% BSA and drained. 10 μl of diluted primary antibody is added to the test and control wells. Anti-ICAM-1-Biotin, Anti-VCAM-1-Biotin and Anti-E-selectin-Biotin are used at a concentration of 10 μg/ml (1:10 dilution of 0.1 mg/ml stock antibody). Cells are incubated at 37° C. for 30 min. in a humidified environment. Wells are washed three times with PBS(+Ca,Mg) +0.5% BSA. 20 μl of diluted ExtrAvidin-Alkaline Phosphatase (1:5,000 dilution, referred to herein as the working dilution) are added to each well and incubated at 37° C. for 30 min. Wells are washed three times with PBS(+Ca,Mg)+0.5% BSA. Dissolve 1 tablet of p-Nitrophenol Phosphate pNPP per 5 ml of glycine buffer (pH 10.4). 100 μl of pNPP substrate in glycine buffer is added to each test well. Standard wells in triplicate are prepared from the working dilution of the ExtrAvidin-Alkaline Phosphotase in glycine buffer: 1:5,000 (10⁰)>10^{-0.5}>10⁻¹>10^{-1.5}.5 μl of each dilution is added to triplicate wells and the resulting AP content in each well is 5.50 ng, 1.74 ng, 0.55 ng, 0.18 ng. 100 μl of pNNP reagent is then added to each of the standard wells. The plate is incubated at 37° C. for 4 h. A volume of 50 1l of 3M NaOH is added to all wells. The plate is read on a plate reader at 405 nm using the background subtraction option on blank wells filled with glycine buffer only. Additionally, the template is set up to indicate the concentration of AP-conjugate in each standard well [5.50 ng; 1.74 ng; 0.55 ng; 0.18 ng]. Results are indicated as amount of bound AP-conjugate in each sample.

### Example 44

### Alamar Blue Endothelial Cells Proliferation Assay

[1286] This assay may be used to quantitatively determine protein mediated inhibition of bFGF-induced proliferation of Bovine Lymphatic Endothelial Cells (LECs), Bovine Aortic Endothelial Cells (BAECs) or Human Microvascular Uterine Myometrial Cells (UTMECs). This assay incorporates a fluorometric growth indicator based on detection of metabolic activity. A standard Alamar Blue Proliferation Assay is prepared in EGM-2MV with 10 ng/ml of bFGF added as a source of endothelial cell stimulation. This assay may be used with a variety of endothelial cells with slight changes in growth medium and cell concentration. Dilutions of the protein batches to be tested are diluted as appropriate. Serum-free medium (GIBCO SFM) without bFGF is used as a non-stimulated control and Angiostatin or TSP-1 are included as a known inhibitory controls.

[1287] Briefly, LEC, BAECs or UTMECs are seeded in growth media at a density of 5000 to 2000 cells/well in a 96 well plate and placed at 37 degrees C. overnight. After the overnight incubation of the cells, the growth media is removed and replaced with GIBCO EC-SFM. The cells are treated with the appropriate dilutions of the protein of interest or control protein sample(s) (prepared in SFM ) in triplicate wells with additional bFGF to a concentration of 10 ng/ ml. Once the cells have been treated with the samples, the plate(s) is/are placed back in the 37° C. incubator for three days. After three days, 10 ml of stock alamar blue (Biosource Cat# DALI 100) is added to each well and the plate(s) is/are placed back in the 37° C. incubator for four hours. The plate(s) are then read at 530 nm excitation and 590 nm emission using the CytoFluor fluorescence reader. Direct output is recorded in relative fluorescence units.

[1288] Alamar blue is an oxidation-reduction indicator that both fluoresces and changes color in response to chemical reduction of growth medium resulting from cell growth. As cells grow in culture, innate metabolic activity results in a chemical reduction of the immediate surrounding environment. Reduction related to growth causes the indicator to change from oxidized (non-fluorescent blue) form to reduced (fluorescent red) form (i.e., stimulated proliferation will produce a stronger signal and inhibited proliferation will produce a weaker signal and the total signal is proportional to the total number of cells as well as their metabolic activity). The background level of activity is observed with the starvation medium alone. This is compared to the output observed from the positive control samples (bFGF in growth medium) and protein dilutions.

### Example 45

### Detection of Inhibition of a Mixed Lymphocyte Reaction

[1289] This assay can be used to detect and evaluate inhibition of a Mixed Lymphocyte Reaction (MLR) by gene products (e.g., isolated polypeptides). Inhibition of a MLR may be due to a direct effect on cell proliferation and viability, modulation of costimulatory molecules on interacting cells, modulation of adhesiveness between lymphocytes and accessory cells, or modulation of cytokine production by accessory cells. Multiple cells may be targeted by these polypeptides since the peripheral blood mononuclear fraction used in this assay includes T, B and natural killer lymphocytes, as well as monocytes and dendritic cells.

[1290] Polypeptides of interest found to inhibit the MLR may find application in diseases associated with lymphocyte and monocyte activation or proliferation. These include, but are not limited to, diseases such as asthma, arthritis, diabetes, inflammatory skin conditions, psoriasis, eczema, systemic lupus erythematosus, multiple sclerosis, glomerulonephritis, inflammatory bowel disease, crohn's disease, ulcerative colitis, arteriosclerosis, cirrhosis, graft vs. host disease, host vs. graft disease, hepatitis, leukemia and lymphoma.

[1291] Briefly, PBMCs from human donors are purified by density gradient centrifugation using Lymphocyte Separation Medium (LSM®, density 1.0770 g/ml, Organon Teknika Corporation, West Chester, Pa.). PBMCs from two donors are adjusted to 2×10⁶ cells/ml in RPMI-1640 (Life Technologies, Grand Island, N.Y.) supplemented with 10% FCS and 2 mM glutamine. PBMCs from a third donor is adjusted to 2×10⁵ cells/ml. Fifty microliters of PBMCs from each donor is added to wells of a 96-well round bottom microtiter plate. Dilutions of test materials (50 μl) is added in triplicate to microtiter wells. Test samples (of the protein of interest) are added for final dilution of 1:4; rhuIL-2 (R&D Systems, Minneapolis, Minn., catalog number 202-IL) is added to a final concentration of 1 μg/ml; anti-CD4 mAb (R&D Systems, clone 34930.11, catalog number MAB379) is added to a final concentration of 10 μg/ml. Cells are cultured for 7-8 days at 37° C. in 5% CO₂, and 1 μC of [³H] thymidine is added to wells for the last 16 hrs of culture. Cells are harvested and thymidine incorporation determined using a Packard TopCount. Data is expressed as the mean and standard deviation of triplicate determinations.

[1292] Samples of the protein of interest are screened in separate experiments and compared to the negative control treatment, anti-CD4 mAb, which inhibits proliferation of lymphocytes and the positive control treatment, IL-2 (either as recombinant material or supernatant), which enhances proliferation of lymphocytes.

[1293] One skilled in the art could easily modify the exemplified studies to test the activity of polynucleotides (e.g., gene therapy), antibodies, agonists, and/or antagonists and fragments and variants thereof.

### Example 46

### Assays for Protease Activity

[1294] The following assay may be used to assess protease activity of the polypeptides of the invention.

[1295] Gelatin and casein zymography are performed essentially as described (Heusen et al., Anal. Biochem., 102:196-202 (1980); Wilson et al., Journal of Urology, 149:653-658 (1993)). Samples are run on 10% polyacryamide/0.1% SDS gels containing 1% gelain orcasein, soaked in 2.5% triton at room temperature for 1 hour, and in 0.1M glycine, pH 8.3 at 37° C. 5 to 16 hours. After staining in amido black areas of proteolysis apear as clear areas agains the blue-black background. Trypsin (Sigma T8642) is used as a positive control.

[1296] Protease activity is also determined by monitoring the cleavage of n-a-benzoyl-L-arginine ethyl ester (BAEE) (Sigma B-4500. Reactions are set up in (25 mMNaPO₄, 1 mM EDTA, and 1 mM BAEE), pH 7.5. Samples are added and the change in adsorbance at 260 nm is monitored on the Beckman DU-6 spectrophotometer in the time-drive mode. Trypsin is used as a positive control.

[1297] Additional assays based upon the release of acid-soluble peptides from casein or hemoglobin measured as adsorbance at 280 nm or calorimetrically using the Folin method are performed as described in Bergmeyer, et al., Methods of Enzymatic Analysis, 5 (1984). Other assays involve the solubilization of chromogenic substrates (Ward, Applied Science, 251-317 (1983)).

### Example 47

### Identifying Serine Protease Substrate Specificity

[1298] Methods known in the art or described herein may be used to determine the substrate specificity of the polypeptides of the present invention having serine protease activity. A preferred method of determining substrate specificity is by the use of positional scanning synthetic combinatorial libraries as described in GB 2 324 529 (incorporated herein in its entirety).

### Example 48

### Ligand Binding Assays

[1299] The following assay may be used to assess ligand binding activity of the polypeptides of the invention.

[1300] Ligand binding assays provide a direct method for ascertaining receptor pharmacology and are adaptable to a high throughput format. The purified ligand for a polypeptide is radiolabeled to high specific activity (50-2000 Ci/mmol) for binding studies. A determination is then made that the process of radiolabeling does not diminish the activity of the ligand towards its polypeptide. Assay conditions for buffers, ions, pH and other modulators such as nucleotides are optimized to establish a workable signal to noise ratio for both membrane and whole cell polypeptide sources. For these assays, specific polypeptide binding is defined as total associated radioactivity minus the radioactivity measured in the presence of an excess of unlabeled competing ligand. Where possible, more than one competing ligand is used to define residual nonspecific binding.

### Example 49

### Functional Assay in Xenopus Oocytes

[1301] Capped RNA transcripts from linearized plasmid templates encoding the polypeptides of the invention are synthesized in vitro with RNA polymerases in accordance with standard procedures. In vitro transcripts are suspended in water at a final concentration of 0.2 mg/mi. Ovarian lobes are removed from adult female toads, Stage V defolliculated oocytes are obtained, and RNA transcripts (10 ng/oocytc) are injected in a 50 nl bolus using a microinjection apparatus. Two electrode voltage clamps are used to measure the currents from individual Xenopus oocytes in response polypeptides and polypeptide agonist exposure. Recordings are made in Ca2+ free Barth's medium at room temperature. The Xenopus system can be used to screen known ligands and tissue/cell extracts for activating ligands.

### Example 50

### Microphysiometric Assays

[1302] Activation of a wide variety of secondary messenger systems results in extrusion of small amounts of acid from a cell. The acid formed is largely as a result of the increased metabolic activity required to fuel the intracellular signaling process. The pH changes in the media surrounding the cell are very small but are detectable by the CYTOSENSOR microphysiometer (Molecular Devices Ltd., Menlo Park, Calif.). The CYTOSENSOR is thus capable of detecting the activation of polypeptide which is coupled to an energy utilizing intracellular signaling pathway.

### Example 51

### Extract/Cell Supernatant Screening

[1303] A large number of mammalian receptors exist for which there remains, as yet, no cognate activating ligand (agonist). Thus, active ligands for these receptors may not be included within the ligands banks as identified to date. Accordingly, the polypeptides of the invention can also be functionally screened (using calcium, cAMP, microphysiometer, oocyte electrophysiology, etc., functional screens) against tissue extracts to identify its natural ligands. Extracts that produce positive functional responses can be sequentially subfractionated until an activating ligand is isolated and identified.

### Example 52

### Calcium and cAMP Functional Assays

[1304] Seven transmembrane receptors which are expressed in HEK 293 cells have been shown to be coupled functionally to activation of PLC and calcium mobilization and/or cAMP stimulation or inhibition. Basal calcium levels in the HEK 293 cells in receptor-transfected or vector control cells were observed to be in the normal, 100 nM to 200 μM, range. HEK 293 cells expressing recombinant receptors are loaded with fura 2 and in a single day >150 selected ligands or tissue/cell extracts are evaluated for agonist induced calcium mobilization. Similarly, HEK 293 cells expressing recombinant receptors are evaluated for the stimulation or inhibition of cAMP production using standard cAMP quantitation assays. Agonists presenting a calcium transient or cAMP fluctuation are tested in vector control cells to determine if the response is unique to the transfected cells expressing receptor.

### Example 53

### ATP-binding assay

[1305] The following assay may be used to assess ATP-binding activity of polypeptides of the invention.

[1306] ATP-binding activity of the polypeptides of the invention may be detected using the ATP-binding assay described in U.S. Pat. No. 5,858,719, which is herein incorporated by reference in its entirety. Briefly, ATP-binding to polypeptides of the invention is measured via photoaffinity labeling with 8-azido-ATP in a competition assay. Reaction mixtures containing 1 mg/ml of the ABC transport protein of the present invention are incubated with varying concentrations of ATP, or the non-hydrolyzable ATP analog adenyl-5′-imidodiphosphate for 10 minutes at 4° C. A mixture of 8-azido-ATP (Sigma Chem. Corp., St. Louis, MO.) plus 8-azido-ATP (³²P-ATP) (5 mCi/μmol, ICN, Irvine Calif.) is added to a final concentration of 100 μM and 0.5 ml aliquots are placed in the wells of a porcelain spot plate on ice. The plate is irradiated using a short wave 254 nm UV lamp at a distance of 2.5 cm from the plate for two one-minute intervals with a one-minute cooling interval in between. The reaction is stopped by addition of dithiothreitol to a final concentration of 2 mM. The incubations are subjected to SDS-PAGE electrophoresis, dried, and autoradiographed. Protein bands corresponding to the particular polypeptides of the invention are excised, and the radioactivity quantified. A decrease in radioactivity with increasing ATP or adenly-5′-imidodiphosphate provides a measure of ATP affinity to the polypeptides.

### Example 54

### Small Molecule Screening

[1307] This invention is particularly useful for screening therapeutic compounds by using the polypeptides of the invention, or binding fragments thereof, in any of a variety of drug screening techniques. The polypeptide or fragment employed in such a test may be affixed to a solid support, expressed on a cell surface, free in solution, or located intracellularly. One method of drug screening utilizes eukaryotic or prokaryotic host cells which are stably transformed with recombinant nucleic acids expressing the polypeptide or fragment. Drugs are screened against such transformed cells in competitive binding assays. One may measure, for example, the formulation of complexes between the agent being tested and polypeptide of the invention.

[1308] Thus, the present invention provides methods of screening for drugs or any other agents which affect activities mediated by the polypeptides of the invention. These methods comprise contacting such an agent with a polypeptide of the invention or fragment thereof and assaying for the presence of a complex between the agent and the polypeptide or fragment thereof, by methods well known in the art. In such a competitive binding assay, the agents to screen are typically labeled. Following incubation, free agent is separated from that present in bound form, and the amount of free or uncomplexed label is a measure of the ability of a particular agent to bind to the polypeptides of the invention.

[1309] Another technique for drug screening provides high throughput screening for compounds having suitable binding affinity to the polypeptides of the invention, and is described in great detail in European Patent Application 84/03564, published on Sep. 13, 1984, which is herein incorporated by reference in its entirety. Briefly stated, large numbers of different small molecule test compounds are synthesized on a solid substrate, such as plastic pins or some other surface. The test compounds are reacted with polypeptides of the invention and washed. Bound polypeptides are then detected by methods well known in the art. Purified polypeptides are coated directly onto plates for use in the aforementioned drug screening techniques. In addition, non-neutralizing antibodies may be used to capture the peptide and immobilize it on the solid support.

[1310] This invention also contemplates the use of competitive drug screening assays in which neutralizing antibodies capable of binding polypeptides of the invention specifically compete with a test compound for binding to the pqlypeptides or fragments thereof. In this manner, the antibodies are used to detect the presence of any peptide which shares one or more antigenic epitopes with a polypeptide of the invention.

### Example 55

### Phosphorylation Assay

[1311] In order to assay for phosphorylation activity of the polypeptides of the invention, a phosphorylation assay as described in U.S. Pat. No. 5,958,405 (which is herein incorporated by reference) is utilized. Briefly, phosphorylation activity may be measured by phosphorylation of a protein substrate using gamma-labeled ³²P-ATP and quantitation of the incorporated radioactivity using a gamma radioisotope counter. The polypeptides of the invention are incubated with the protein substrate, ³²P-ATP, and a kinase buffer. The ³²p incorporated into the substrate is then separated from free ³²P-ATP by electrophoresis, and the incorporated ³²P is counted and compared to a negative control. Radioactivity counts above the negative control are indicative of phosphorylation activity of the polypeptides of the invention.

### Example 56

### Detection of Phosphorylation Activity (Activation) of the Polypeptides of the Invention in the Presence of Polypeptide Ligands

[1312] Methods known in the art or described herein may be used to determine the phosphorylation activity of the polypeptides of the invention. A preferred method of determining phosphorylation activity is by the use of the tyrosine phosphorylation assay as described in U.S. Pat. No. 5,817,471 (incorporated herein by reference).

### Example 57

### Identification of Signal Transduction Proteins that Interact with Polypeptides of the Present Invention

[1313] The purified polypeptides of the invention are research tools for the identification, characterization and purification of additional signal transduction pathway proteins or receptor proteins. Briefly, labeled polypeptides of the invention are useful as reagents for the purification of molecules with which it interacts. In one embodiment of affinity purification, polypeptides of the invention are covalently coupled to a chromatography column. Cell-free extract derived from putative target cells, such as carcinoma tissues, is passed over the column, and molecules with appropriate affinity bind to the polypeptides of the invention. The protein complex is recovered from the column, dissociated, and the recovered molecule subjected to N-terminal protein sequencing. This amino acid sequence is then used to identify the captured molecule or to design degenerate oligonucleotide probes for cloning the relevant gene from an appropriate cDNA library.

### Example 58

### IL-6 Bioassay

[1314] To test the proliferative effects of the polypeptides of the invention, the IL-6 Bioassay as described by Marz et al. is utilized (Proc. Natl. Acad. Sci., U.S.A., 95:3251-56 (1998), which is herein incorporated by reference). Briefly, IL-6 dependent B9 murine cells are washed three times in IL-6 free medium and plated at a concentration of 5,000 cells per well in 50 μl, and 50 μl of the IL-6-like polypeptide is added. After 68 hrs. at 37° C., the number of viable cells is measured by adding the tetrazolium salt thiazolyl blue (MTT) and incubating for a further 4 hrs. at 37° C. B9 cells are lysed by SDS and optical density is measured at 570 nm. Controls containing IL-6 (positive) and no cytokine (negative) are utilized. Enhanced proliferation in the test sample(s) relative to the negative control is indicative of proliferative effects mediated by polypeptides of the invention.

### Example 59

### Support of Chicken Embryo Neuron Survival

[1315] To test whether sympathetic neuronal cell viability is supported by polypeptides of the invention, the chicken embryo neuronal survival assay of Senaldi et al is utilized (Proc. Natl. Acad. Sci., U.S.A., 96:11458-63 (1998), which is herein incorporated by reference). Briefly, motor and sympathetic neurons are isolated from chicken embryos, resuspended in L15 medium (with 10% FCS, glucose, sodium selenite, progesterone, conalbumin, putrescine, and insulin; Life Technologies, Rockville, Md.) and Dulbecco's modified Eagles medium [with 10% FCS, glutamine, penicillin, and 25 mM Hepes buffer (pH 7.2); Life Technologies, Rockville, Md.], respectively, and incubated at 37° C. in 5% CO₂ in the presence of different concentrations of the purified IL-6-like polypeptide, as well as a negative control lacking any cytokine. After 3 days, neuron survival is determined by evaluation of cellular morphology, and through the use of the colorimetric assay of Mosmann (Mosmann, T., J. Immunol. Methods, 65:55-63 (1983)). Enhanced neuronal cell viability as compared to the controls lacking cytokine is indicative of the ability of the inventive purified IL-6-like polypeptide(s) to enhance the survival of neuronal cells.

### Example 60

### Assay for Phosphatase Activity

[1316] The following assay may be used to assess serine/threonine phosphatase (PTPase) activity of the polypeptides of the invention.

[1317] In order to assay for serine/threonine phosphatase (PTPase) activity, assays can be utilized which are widely known to those skilled in the art. For example, the serine/threonine phosphatase (PSPase) activity is measured using a PSPase assay kit from New England Biolabs, Inc. Myelin basic protein (MyBP), a substrate for PSPase, is phosphorylated on serine and threonine residues with cAMP-dependent Protein Kinase in the presence of [³²P]ATP. Protein serine/threonine phosphatase activity is then determined by measuring the release of inorganic phosphate from 32P-labeled MyBP.

### Example 61

### Interaction of Serine/Threonine Phosphatases with Other Proteins

[1318] The polypeptides of the invention with serine/threonine phosphatase activity as determined in Example 60 are research tools for the identification, characterization and purification of additional interacting proteins or receptor proteins, or other signal transduction pathway proteins. Briefly, labeled polypeptide(s) of the invention is useful as a reagent for the purification of molecules with which it interacts. In one embodiment of affinity purification, polypeptide of the invention is covalently coupled to a chromatography column. Cell-free extract derived from putative target cells, such as neural or liver cells, is passed over the column, and molecules with appropriate affinity bind to the polypeptides of the invention. The polypeptides of the invention complex is recovered from the column, dissociated, and the recovered molecule subjected to N-terminal protein sequencing. This amino acid sequence is then used to identify the captured molecule or to design degenerate oligonucleotide probes for cloning the relevant gene from an appropriate cDNA library.

### Example 62

### Assaying for Heparanase Activity

[1319] In order to assay for heparanase activity of the polypeptides of the invention, the heparanase assay described by Vlodavsky et al is utilized (Vlodavsky, I., et al., Nat. Med., 5:793-802 (1999)). Briefly, cell lysates, conditioned media or intact cells (1×10⁶ cells per 35-mm dish) are incubated for 18 hrs at 37° C., pH 6.2-6.6, with ³⁵S-labeled ECM or soluble ECM derived peak I proteoglycans. The incubation medium is centrifuged and the supernatant is analyzed by gel filtration on a Sepharose CL-6B column (0.9×30 cm). Fractions are eluted with PBS and their radioactivity is measured. Degradation fragments of heparan sulfate side chains are eluted from Sepharose 6B at 0.5<Kₐᵥ<0.8 (peak II). Each experiment is done at least three times. Degradation fragments corresponding to “peak II,” as described by Vlodavsky et al., is indicative of the activity of the polypeptides of the invention in cleaving heparan sulfate.

### Example 63

### Immobilization of Biomolecules

[1320] This example provides a method for the stabilization of polypeptides of the invention in non-host cell lipid bilayer constucts (see, e.g., Bieri et al., Nature Biotech 17:1105-1108 (1999), hereby incorporated by reference in its entirety herein) which can be adapted for the study of polypeptides of the invention in the various functional assays described above. Briefly, carbohydrate-specific chemistry for biotinylation is used to confine a biotin tag to the extracellular domain of the polypeptides of the invention, thus allowing uniform orientation upon immobilization. A 50 uM solution of polypeptides of the invention in washed membranes is incubated with 20 mM NaIO4 and 1.5 mg/ml (4 mM) BACH or 2 mg/ml (7.5 mM) biotin-hydrazide for 1 hr at room temperature (reaction volume, 150 ul). Then the sample is dialyzed (Pierce Slidealizer Cassett, 10 kDa cutoff; Pierce Chemical Co., Rockford Ill.) at 4° C. first for 5 h, exchanging the buffer after each hour, and finally for 12 h against 500 ml buffer R (0.15 M NaCl, 1 mM MgCl2, 10 mM sodium phosphate, pH7). Just before addition into a cuvette, the sample is diluted 1:5 in buffer ROG50 (Buffer R supplemented with 50 mM octylglucoside).

### Example 64

### TAQMAN

[1321] Quantitative PCR (QPCR).

[1322] Total RNA from cells in culture are extracted by Trizol separation as recommended by the supplier (LifeTechnologies). (Total RNA is treated with DNase I (Life Technologies) to remove any contaminating genomic DNA before reverse transcription.) Total RNA (50 ng) is used in a one-step, 50 ul, RT-QPCR, consisting of Taqman Buffer A (Perkin-Elmer; 50 mM KCl/10 mM Tris, pH 8.3), 5.5 mM MgCl₂, 240 μM each dNTP, 0.4 units R-Nase inhibitor (Promega), 8%glycerol, 0.012% Tween-20, 0.05% gelatin, 0.3 uM primers, 0.1 uM probe, 0.025 units Amplitaq Gold (Perkin-Elmer) and 2.5 units Superscript II reverse transcriptase (Life Technologies). As a control for genomic contamination, parallel reactions are setup without reverse transcriptase. The relative abundance of (unknown) and 18S RNAs are assessed by using the Applied Biosystems Prism 7700 Sequence Detection System (Livak, K. J., Flood, S. J., Marmaro, J., Giusti, W. & Deetz, K. (1995) PCR Methods Appl. 4, 357-362). Reactions are carried out at 48° C. for 30 min, 95° C. for 10 min, followed by 40 cycles of 95° C. for 15 s, 60° C. for 1 min. Reactions are performed in triplicate.

[1323] Primers (f & r) and FRET probes sets are designed using Primer Express Software (Perkin-Elmer). Probes are labeled at the 5′-end with the reporter dye 6-FAM and on the 3′-end with the quencher dye TAMRA (Biosource International, Camarillo, Calif. or Perkin-Elmer).

### Example 65

### Assays for Metalloproteinase Activity

[1324] Metalloproteinases (EC 3.4.24.-) are peptide hydrolases which use metal ions, such as Zn²⁺, as the catalytic mechanism. Metalloproteinase activity of polypeptides of the present invention can be assayed according to the following methods. Proteolysis of alpha-2-macroglobulin

[1325] To confirm protease activity, purified polypeptides of the invention are mixed with the substrate alpha-2-macroglobulin (0.2 unit/ml; Boehringer Mannheim, Germany) in lx assay buffer (50 mM HEPES, pH 7.5, 0.2 M NaCl, 10 mM CaCl₂, 25 μM ZnCl₂ and 0.05% Brij-35) and incubated at 37° C. for 1-5 days. Trypsin is used as positive control. Negative controls contain only alpha-2-macroglobulin in assay buffer. The samples are collected and boiled in SDS-PAGE sample buffer containing 5% 2-mercaptoethanol for 5-min, then loaded onto 8% SDS-polyacrylamide gel. After electrophoresis the proteins are visualized by silver staining. Proteolysis is evident by the appearance of lower molecular weight bands as compared to the negative control.

[1326] Inhibition of Alpha-2-macroglobulin Proteolysis by Inhibitors of Metalloproteinases

[1327] Known metalloproteinase inhibitors (metal chelators (EDTA, EGTA, AND HgCl₂), peptide metalloproteinase inhibitors (TIMP-1 and TIMP-2), and commercial small molecule MMP inhibitors) are used to characterize the proteolytic activity of polypeptldes of the invention. The three synthetic MMP inhibitors used are: MMP inhibitor I, [IC₅₀=1.0 μM against MMP-1 and MMP-8; IC₅₀=30 μM against MMP-9; IC₅₀=150 μM against MMP-3]; MMP-3 (stromelysin-1) inhibitor I [IC₅₀=5 μM against MMP-3], and MMP-3 inhibitor II [Kᵢ=130 nM against MMP-3]; inhibitors available through Calbiochem, catalog # 444250, 444218, and 444225, respectively). Briefly, different concentrations of the small molecule MMP inhibitors are mixed with purified polypeptides of the invention (50 μg/ml) in 22.9 μl of 1× HEPES buffer (50 mM HEPES, pH 7.5, 0.2 M NaCl, 10 mM CaCl₂, 25 μM ZnCl₂ and 0.05%Brij-35) and incubated at room temperature (24° C.) for 2-hr, then 7.1 μl of substrate alpha-2-macroglobulin (0.2 unit/ml) is added and incubated at 37° C. for 20-hr. The reactions are stopped by adding 4× sample buffer and boiled immediately for 5 minutes. After SDS-PAGE, the protein bands are visualized by silver stain.

[1328] Synthetic Fluorogenic Peptide Substrates Cleavage Assay

[1329] The substrate specificity for polypeptides of the invention with demonstrated metalloproteinase activity can be determined using synthetic fluorogenic peptide substrates (purchased from BACHEM Bioscience Inc). Test substrates include, M-1985, M-2225, M-2105, M-2110, and M-2255. The first four are MMP substrates and the last one is a substrate of tumor necrosis factor-α (TNF-α) converting enzyme (TACE). All the substrates are prepared in 1:1 dimethyl sulfoxide (DMSO) and water. The stock solutions are 50-500 μM. Fluorescent assays are performed by using a Perkin Elmer LS 50B luminescence spectrometer equipped with a constant temperature water bath. The excitation k is 328 nm and the emission k is 393 nm. Briefly, the assay is carried out by incubating 176 μl 1× HEPES buffer (0.2 M NaCl, 10 mM CaCl₂, 0.05% Brij-35 and 50 mM HEPES, pH 7.5) with 4 μl of substrate solution (50 μM) at 25° C. for 15 minutes, and then adding 20 μl of a purified polypeptide of the invention into the assay cuvett. The final concentration of substrate is 1 μM. Initial hydrolysis rates are monitored for 30-min.

### Example 66

### Characterization of the cDNA contained in a deposited plasmid

[1330] The size of the cDNA insert contained in a deposited plasmid may be routinely determined using techniques known in the art, such as PCR amplification using synthetic primers hybridizable to the 3′ and 5′ ends of the cDNA sequence. For example, two primers of 17-30 nucleotides derived from each end of the cDNA (i.e., hybridizable to the absolute 5′ nucleotide or the 3′ nucleotide end of the sequence of SEQ ID NO:X, respectively) are synthesized and used to amplify the cDNA using the deposited cDNA plasmid as a template. The polymerase chain reaction is carried out under routine conditions, for instance, in 25 ul of reaction mixture with 0.5 ug of the above cDNA template. A convenient reaction mixture is 1.5-5 mM MgCl₂, 0.01% (w/v) gelatin, 20 uM each of dATP, dCTP, dGTP, dTTP, 25 pmol of each primer and 0.25 Unit of Taq polymerase. Thirty five cycles of PCR (denaturation at 94 degree C. for 1 min; annealing at 55 degree C. for 1 min; elongation at 72 degree C. for 1 min) are performed with a Perkin-Elmer Cetus automated thermal cycler. The amplified product is analyzed by agarose gel electrophoresis. The PCR product is verified to be the selected sequence by subcloning and sequencing the DNA product.

[1331] Use of the above methodologies and/or other methodologies known in the art generates fragments from the clone corresponding to the approximate fragments described in Table 8, below. Accordingly, Table 8 provides a physical characterization of certain clones encompassed by the invention. The first column provides the unique clone identifier, “Clone ID NO:Z”, for cDNA clones of the invention, as described in Table 1A. The second column provides the approximate size of the cDNA insert contained in the corresponding cDNA clone.

TABLE 8

| | cDNA |
|---|---|
| Clone ID | Insert |
| NO:Z | Size: |
| HBGQQ95 | 500 |
| HCROG94 | 300 |
| HDTFW91 | 400 |
| HJABA68 | 1300 |
| HMUAB01 | 300 |
| HSYDH59 | 1200 |
| HTTEV13 | 1400 |
| HTWCG65 | 300 |
| HUSXZ80 | 200 |
| HWWFC08 | 500 |
| HYAAS55 | 1200 |

[1332] It will be clear that the invention may be practiced otherwise than as particularly described in the foregoing description and examples. Numerous modifications and variations of the present invention are possible in light of the above teachings and, therefore, are within the scope of the appended claims.

[1333] The entire disclosure of each document cited (including patents, patent applications, journal articles, abstracts, laboratory manuals, books, or other disclosures) in the Background of the Invention, Detailed Description, and Examples is hereby incorporated herein by reference. In addition, the CD-R copy of the sequence listing submitted herewith and the corresponding computer readable form are both incorporated herein by reference in their entireties. The specification and sequence listing of each of the following U.S. applications are herein incorporated by reference in their entirety: Application No. 60/179,065, filed on Jan. 31, 2000; Application No. 60/180,628, filed on Feb. 4, 2000; Application No. 60/214,886, filed on Jun. 28, 2000; Application No. 60/217,487, filed on Jul. 1, 2000; Application No. 60/225,758, filed on Aug. 14, 2000; Application No. 60/220,963, filed on Jul. 26, 2000; Application No. 60/217,496, filed on Jul 11, 2000; Application No. 60/225,447, filed on Aug. 14, 2000; Application No. 60/218,290, filed on Jul. 14, 2000; Application No. 60/225,757, filed on Aug. 14, 2000; Application No. 60/226,868, filed on Aug. 22, 2000; Application No. 60/216,647, filed on Jul. 7, 2000; Application No. 60/225,267, filed on Aug. 14, 2000; Application No. 60/216,880, filed on Jul. 7, 2000; Application No. 60/225,270, filed on Aug. 14, 2000; Application No. 60/251,869, filed on Dec. 8, 2000; Application No. 60/235,834, filed on Sep. 27, 2000; Application No. 60/234,274, filed on Sep. 21, 2000; Application No. 60/234,223, filed on Sep. 21, 2000; Application No. 60/228,924, filed on Aug. 30, 2000; Application No. 60/224,518, filed on Aug. 14, 2000; Application No. 60/236,369, filed on Sep. 29, 2000; Application No. 60/224,519, filed on Aug. 14, 2000; Application No. 60/220,964, filed on Jul. 26, 2000; Application No. 60/241,809, filed on Oct. 20, 2000; Application No. 60/249,299, filed on Nov. 17, 2000; Application No. 60/236,327, filed on Sep. 29, 2000; Application No. 60/241,785, filed on Oct. 20, 2000; Application No. 60/244,617, filed on Nov. 1, 2000; Application No. 60/225,268, filed on Aug. 14, 2000; Application No. 60/236,368, filed on Sep. 29, 2000; Application No. 60/251,856, filed on Dec. 8, 2000; Application No. 60/251,868, filed on Dec. 8, 2000; Application No. 60/229,344, filed on Sep. 1, 2000; Application No. 60/234,997, filed on Sep. 25, 2000; Application No. 60/229,343, filed on Sep. 1, 2000; Application No. 60/229,345, filed on Sep. 1, 2000; Application No. 60/229,287, filed on Sep. 1, 2000; Application No. 60/229,513, filed on Sep. 5, 2000; Application No. 60/231,413, filed on Sep. 8, 2000; Application No. 60/229,509, filed on Sep. 5, 2000; Application No. 60/236,367, filed on Sep. 29, 2000; Application No. 60/237,039, filed on Oct. 2, 2000; Application No. 60/237,038, filed on Oct. 2, 2000; Application No. 60/236,370, filed on Sep. 29, 2000; Application No. 60/236,802, filed on Oct. 2, 2000; Application No. 60/237,037, filed on Oct. 2, 2000; Application No. 60/237,040, filed on Oct. 2, 2000; Application No. 60/240,960, filed on Oct. 20, 2000; Application No. 60/239,935, filed on Oct. 13, 2000; Application No. 60/239,937, filed on Oct. 13, 2000; Application No. 60/241,787, filed on Oct. 20, 2000; Application No. 60/246,474, filed on Nov. 8, 2000; Application No. 60/246,532, filed on Nov. 8, 2000; Application No. 60/249,216, filed on Nov. 17, 2000; Application No. 60/249,210, filed on Nov. 17, 2000; Application No. 60/226,681, filed on Aug. 22, 2000; Application No. 60/225,759, filed on Aug. 14, 2000; Application No. 60/225,213, filed on Aug. 14, 2000; Application No. 60/227,182, filed on Aug. 22, 2000; Application No. 60/225,214, filed on Aug. 14, 2000; Application No. 60/235,836, filed on Sep. 27, 2000; Application No. 60/230,438, filed on Sep 6, 2000; Application No. 60/215,135, filed on Jun. 30, 2000; Application No. 60/225,266, filed on Aug. 14, 2000; Application No. 60/249,218, filed on Nov. 17, 2000; Application No. 60/249,208, filed on Nov. 17, 2000; Application No. 60/249,213, filed on Nov. 17, 2000; Application No. 60/249,212, filed on Nov. 17, 2000; Application No. 60/249,207, filed on Nov. 17, 2000; Application No. 60/249,245, filed on Nov. 17, 2000; Application No. 60/249,244, filed on Nov. 17, 2000; Application No. 60/249,217, filed on Nov. 17, 2000; Application No. 60/249,211, filed on Nov. 17, 2000; Application No. 60/249,215, filed on Nov. 17, 2000; Application No. 60/249,264, filed on Nov. 17, 2000; Application No. 60/249,214, filed on Nov. 17, 2000; Application No. 60/249,297, filed on Nov. 17, 2000; Application No. 60/232,400, filed on Sep. 14, 2000; Application No. 60/231,242, filed on Sep. 8, 2000; Application No. 60/232,081, filed on Sep. 8, 2000; Application No. 60/232,080, filed on Sep. 8, 2000; Application No. 60/231,414, filed on Sep. 8, 2000; Application No. 60/231,244, filed on Sep. 8, 2000; Application No. 60/233,064, filed on Sep. 14, 2000; Application No. 60/233,063, filed on Sep. 14, 2000; Application No. 60/232,397, filed on Sep. 14, 2000; Application No. 60/232,399, filed on Sep. 14, 2000; Application No. 60/232,401, filed on Sep. 14, 2000; Application No. 60/241,808, filed on Oct. 20, 2000; Application No. 60/241,826, filed on Oct. 20, 2000; Application No. 60/241,786, filed on Oct. 20, 2000; Application No. 60/241,221, filed on Oct. 20, 2000; Application No. 60/246,475, filed on Nov. 8, 2000; Application No. 60/231,243, filed on Sep. 8, 2000; Application No. 60/233,065, filed on Sep. 14, 2000; Application No. 60/232,398, filed on Sep. 14, 2000; Application No. 60/234,998, filed on Sep. 25, 2000; Application No. 60/246,477, filed on Nov. 8, 2000; Application No. 60/246,528, filed on Nov. 8, 2000; Application No. 60/246,525, filed on Nov. 8, 2000; Application No. 60/246,476, filed on Nov. 8, 2000; Application No. 60/246,526, filed on Nov. 8, 2000; Application No. PT172, filed on Nov. 17, 2000; Application No. 60 /246,527, filed on Nov. 8, 2000; Application No. 60/246,523, filed on Nov. 8, 2000; Application No. 60/246,524, filed on Nov. 8, 2000; Application No. 60/246,478, filed on Nov. 8, 2000; Application No. 60/246,609, filed on Nov. 8, 2000, Application No. 60/246,613, filed on Nov. 8, 2000; Application No. 60/249,300, filed on Nov. 17, 2000; Application No. 60/249,265, filed on Nov. 17, 2000; Application No. 60/246,610, filed on Nov. 8, 2000; Application No. 60/246,611, filed on Nov. 8, 2000; Application No. 60/230,437, filed on Sep 6, 2000; Application No. 60/251,990, filed on Dec. 8, 2000; Application No. 60/251,988, filed on Dec. 5, 2000; Application No. 60/251,030, filed on Dec. 5, 2000; Application No. 60/251,479, filed on Dec. 6, 2000; Application No. PJ005, filed on Dec. 5, 2000; Application No. PJ006, filed on Dec. 1, 2000; Application No. 60/251,989, filed on Dec. 8, 2000; Application No. 60/250,391, filed on Dec. 1, 2000; and Application No. 60/254,097, filed on Dec. 11, 2000.

[1334] Moreover, the microfiche copy and the corresponding computer readable form of the Sequence Listing of U.S. Application Ser. No. 60/179,065, and the hard copy of and the corresponding computer readable form of the Sequence Listing of U.S. Application Ser. No. 60/180,628 are also incorporated herein by reference in their entireties.

What is claimed is:

1. An isolated nucleic acid molecule comprising a polynucleotide having a nucleotide sequence at least 95% identical to a sequence selected from the group consisting of:
(a) a polynucleotide fragment of SEQ ID NO:X or a polynucleotide fragment of the cDNA sequence contained in Clone ID NO:Z, which is hybridizable to SEQ ID NO:X;
(b) a polynucleotide encoding a polypeptide fragment of SEQ ID NO:Y or a polypeptide fragment encoded by the cDNA sequence contained in cDNA Clone ID NO:Z, which is hybridizable to SEQ ID NO:X;
(c) a polynucleotide encoding a polypeptide fragment of a polypeptide encoded by SEQ ID NO:X or a polypeptide fragment encoded by the cDNA sequence contained in cDNA Clone ID NO:Z, which is hybridizable to SEQ ID NO:X;
(d) a polynucleotide encoding a polypeptide domain of SEQ ID NO:Y or a polypeptide domain encoded by the cDNA sequence contained in cDNA Clone ID NO:Z, which is hybridizable to SEQ ID NO:X;
(e) a polynucleotide encoding a polypeptide epitope of SEQ ID NO:Y or a polypeptide epitope encoded by the cDNA sequence contained in cDNA Clone ID NO:Z, which is hybridizable to SEQ ID NO:X;
(f) a polynucleotide encoding a polypeptide of SEQ ID NO:Y or the cDNA sequence contained in cDNA Clone ID NO:Z, which is hybridizable to SEQ ID NO:X, having biological activity;
(g) a polynucleotide which is a variant of SEQ ID NO:X;
(h) a polynucleotide which is an allelic variant of SEQ ID NO:X;
(i) a polynucleotide which encodes a species homologue of the SEQ ID NO:Y;
(j) a polynucleotide capable of hybridizing under stringent conditions to any one of the polynucleotides specified in (a)-(i), wherein said polynucleotide does not hybridize under stringent conditions to a nucleic acid molecule having a nucleotide sequence of only A residues or of only T residues.

2. The isolated nucleic acid molecule of claim 1, wherein the polynucleotide fragment comprises a nucleotide sequence encoding a protein.

3. The isolated nucleic acid molecule of claim 1, wherein the polynucleotide fragment comprises a nucleotide sequence encoding the sequence identified as SEQ ID NO:Y or the polypeptide encoded by the cDNA sequence contained in cDNA Clone ID NO:Z, which is hybridizable to SEQ ID NO:X.

4. The isolated nucleic acid molecule of claim 1, wherein the polynucleotide fragment comprises the entire nucleotide sequence of SEQ ID NO:X or the cDNA sequence contained in cDNA Clone ID NO:Z, which is hybridizable to SEQ ID NO:X.

5. The isolated nucleic acid molecule of claim 2, wherein the nucleotide sequence comprises sequential nucleotide deletions from either the C-terminus or the N-terminus.

6. The isolated nucleic acid molecule of claim 3, wherein the nucleotide sequence comprises sequential nucleotide deletions from either the C-terminus or the N-terminus.

7. A recombinant vector comprising the isolated nucleic acid molecule of claim 1.

8. A method of making a recombinant host cell comprising the isolated nucleic acid molecule of claim 1.

9. A recombinant host cell produced by the method of claim 8.

10. The recombinant host cell of claim 9 comprising vector sequences.

11. An isolated polypeptide comprising an amino acid sequence at least 90% identical to a sequence selected from the group consisting of:
(a) a polypeptide fragment of SEQ ID NO:Y or the encoded sequence contained in cDNA Clone ID NO:Z;
(b) a polypeptide fragment of SEQ ID NO:Y or the encoded sequence contained in cDNA Clone ID NO:Z, having biological activity;
(c) a polypeptide domain of SEQ ID NO:Y or the encoded sequence contained in cDNA Clone ID NO:Z;
(d) a polypeptide epitope of SEQ ID NO:Y or the encoded sequence contained in cDNA Clone ID NO:Z;
(e) a full length protein of SEQ ID NO:Y or the encoded sequence contained in cDNA Clone ID NO:Z;
(f) a variant of SEQ ID NO:Y;
(g) an allelic variant of SEQ ID NO:Y; or
(h) a species homologue of the SEQ ID NO:Y.

12. The isolated polypeptide of claim 11, wherein the full length protein comprises sequential amino acid deletions from either the C-terminus or the N-terminus.

13. An isolated antibody that binds specifically to the isolated polypeptide of claim 11.

14. A recombinant host cell that expresses the isolated polypeptide of claim 11.

15. A method of making an isolated polypeptide comprising:
(a) culturing the recombinant host cell of claim 14 under conditions such that said polypeptide is expressed; and
(b) recovering said polypeptide.

16. The polypeptide produced by claim 15.

17. A method for preventing, treating, or ameliorating a medical condition, comprising administering to a mammalian subject a therapeutically effective amount of the polynucleotide of claim 1.

18. A method of diagnosing a pathological condition or a susceptibility to a pathological condition in a subject comprising:
(a) determining the presence or absence of a mutation in the polynucleotide of claim 1; and
(b) diagnosing a pathological condition or a susceptibility to a pathological condition based on the presence or absence of said mutation.

19. A method of diagnosing a pathological condition or a susceptibility to a pathological condition in a subject comprising:
(a) determining the presence or amount of expression of the polypeptide of claim 11 in a biological sample; and
(b) diagnosing a pathological condition or a susceptibility to a pathological condition based on the presence or amount of expression of the polypeptide.

20. A method for identifying a binding partner to the polypeptide of claim 11 comprising:
(a) contacting the polypeptide of claim 11 with a binding partner; and
(b) determining whether the binding partner effects an activity of the polypeptide.

21. The gene corresponding to the cDNA sequence of SEQ ID NO:Y.

22. A method of identifying an activity in a biological assay, wherein the method comprises:
(a) expressing SEQ ID NO:X in a cell;
(b) isolating the supernatant;
(c) detecting an activity in a biological assay; and
identifying the protein in the supernatant having the activity.

23. The product produced by the method of claim 20.

24. A method for preventing, treating, or ameliorating a medical condition, comprising administering to a mammalian subject a therapeutically effective amount of the polypeptide of claim 11.

The application's sequence listing, which the Patent Office published only in electronic form, follows.

SEQUENCE LISTING (348 sequences)

SEQ ID NO: 1 - DNA, 733 bp, Homo sapiens
gggatccggagcccaaatcttctgacaaaactcacacatgcccaccgtgcccagcacctgaattcgagggtgcaccgtcagtcttcctcttccccccaaaacccaaggacaccctcatgatctcccggactcctgaggtcacatgcgtggtggtggacgtaagccacgaagaccctgaggtcaagttcaactggtacgtggacggcgtggaggtgcataatgccaagacaaagccgcgggaggagcagtacaacagcacgtaccgtgtggtcagcgtcctcaccgtcctgcaccaggactggctgaatggcaaggagtacaagtgcaaggtctccaacaaagccctcccaacccccatcgagaaaaccatctccaaagccaaagggcagccccgagaaccacaggtgtacaccctgcccccatcccgggatgagctgaccaagaaccaggtcagcctgacctgcctggtcaaaggcttctatccaagcgacatcgccgtggagtgggagagcaatgggcagccggagaacaactacaagaccacgcctcccgtgctggactccgacggctccttcttcctctacagcaagctcaccgtggacaagagcaggtggcagcaggggaacgtcttctcatgctccgtgatgcatgaggctctgcacaaccactacacgcagaagagcctctccctgtctccgggtaaatgagtgcgacggccgcgactctagaggat

SEQ ID NO: 2 - protein, 5 aa, Homo sapiens
  Site (3): Xaa equals any of the twenty naturally ocurring L-amino acids
WSXWS

SEQ ID NO: 3 - DNA, 86 bp, Artificial Sequence
  Primer_Bind: Synthetic sequence with 4 tandem copies of the GAS binding site found in the IRF1 promoter (Rothman et al., Immunity 1:457-468 (1994)), 18 nucleotides complementary to the SV40 early promoter, and a Xho I restriction site.
gcgcctcgagatttccccgaaatctagatttccccgaaatgatttccccgaaatgatttccccgaaatatctgccatctcaattag

SEQ ID NO: 4 - DNA, 27 bp, Artificial Sequence
  Primer_Bind: Synthetic sequence complementary to the SV40 promter; includes a Hind III restriction site.
gcggcaagctttttgcaaagcctaggc

SEQ ID NO: 5 - DNA, 271 bp, Artificial Sequence
  Protein_Bind: Synthetic promoter for use in biological assays; includes GAS binding sites found in the IRF1 promoter (Rothman et al., Immunity 1:457-468 (1994)).
ctcgagatttccccgaaatctagatttccccgaaatgatttccccgaaatgatttccccgaaatatctgccatctcaattagtcagcaaccatagtcccgcccctaactccgcccatcccgcccctaactccgcccagttccgcccattctccgccccatggctgactaattttttttatttatgcagaggccgaggccgcctcggcctctgagctattccagaagtagtgaggaggcttttttggaggcctaggcttttgcaaaaagctt

SEQ ID NO: 6 - DNA, 32 bp, Artificial Sequence
  Primer_Bind: Synthetic primer complementary to human genomic EGR-1 promoter sequence (Sakamoto et al., Oncogene 6:867-871 (1991)); includes a Xho I restriction site.
gcgctcgagggatgacagcgatagaaccccgg

SEQ ID NO: 7 - DNA, 31 bp, Artificial Sequence
  Primer_Bind: Synthetic primer complementary to human genomic EGR-1 promoter sequence (Sakamoto et al., Oncogene 6:867-871 (1991)); includes a Hind III restriction site.
gcgaagcttcgcgactccccggatccgcctc

SEQ ID NO: 8 - DNA, 12 bp, Homo sapiens
ggggactttccc

SEQ ID NO: 9 - DNA, 73 bp, Artificial Sequence
  Primer_Bind: Synthetic primer with 4 tandem copies of the NF-KB binding site (GGGGACTTTCCC), 18 nucleotides complementary to the 5' end of the SV40 early promoter sequence, and a XhoI restriction site.
gcggcctcgaggggactttcccggggactttccggggactttccgggactttccatcctgccatctcaattag

SEQ ID NO: 10 - DNA, 256 bp, Artificial Sequence
  Protein_Bind: Synthetic promoter for use in biological assays; includes NF-KB binding sites.
ctcgaggggactttcccggggactttccggggactttccgggactttccatctgccatctcaattagtcagcaaccatagtcccgcccctaactccgcccatcccgcccctaactccgcccagttccgcccattctccgccccatggctgactaattttttttatttatgcagaggccgaggccgcctcggcctctgagctattccagaagtagtgaggaggcttttttggaggcctaggcttttgcaaaaagctt

SEQ ID NO: 11 - DNA, 765 bp, Homo sapiens
  SITE (651): n equals a,t,g, or c
  SITE (763): n equals a,t,g, or c
ggacgcatcgagtacctggtgaaatggaaggggtgggcgatcaagtacagcacttgggagcccgaggagaacatcctggactcgcggctcattgcagccttcgaacaaaaggagagggagcgtgagctgtatgggcccaagaagaggggacccaaacccaaaactttcctcctgaaggcgcgggcccaggccgaggccctccgcatcagtgatgtgcatttctctgtcaagccgagcgccagtgcctcctcgcccaagctgcactccagcgcagccgtgcaccggctcaagaaggacatccgccgctgccaccgtatgtcccgccgtcccctgccccgcccggacccgcaggggggcagccccggactgcgcccgcccatttcgcccttctcggagacggtgcgcatcatcaaccgcaaggtgaagccgcgggagcccaagcggaaccgcatcatcctgaacctgaaggtgatcgacaagggcgctggcggcgggggcgccgggcagggggccggggcgctggcccgccccaaagtcccctcgcggaaccgcgtttataggcaagagcaagaagttcagcgagagcttcctgcgtacacagatccgccacatgaagttcggcgcctttgcgctgtacaagcctccgcccgnscccctggtagccccgtcccccggcaaggctgaggcctcagccccgggccctgggctayttytggccgcccccgccgcccccttacgacgcccgcagtctggttcttccggntg

SEQ ID NO: 12 - DNA, 1633 bp, Homo sapiens
gacgcaggacccaactgaaacaaagtgtcggccgcccggcgccggcgcccgccccgaccctgcccctcccgcccgcaactccgccgcccaccatggcttccgaggagctgtacgaggttgaaaggattgttgacaaaaggaaaaataaaaaagggaagacagagtatttggttcggtggaaaggctatgacagcgaggacgacacttgggagccggaacagcacctcgtgaactgtgaggaatacatccacgacttcaacagacgccacacggagaagcagaaggagagcacattgaccagaacaaacaggacctctcccaacaatgctaggaaacaaatctccagatccaccaacagcaacttttctaagacctctcctaaggcactcgtgattgggaaagaccacgaatccaaaaacagccagctgtttgctgccagccagaagttcaggaagaacacagctccatctctctccagccggaagaacatggacctagcgaagtcaggtatcaagatcctcgtgcctaaaagccccgttaagagcaggaccgcagtggacggctttcagagcgagagccctgagaaactggaccccgtcgagcagggtcaggaggacacagtggcacccgaagtggcagcggaaaagccggtcggagctttattgggccccggtgccgagagggccaggatggggagcaggcccaggatacacccactagtgcctcaggtgcccggccctgtgactgcagccatggccacaggcttagctgttaacgggaaaggtacatctccgttcatggatgcattaacagccaatgggacaaccaacatacagacatctgttacaggagtgactgccagcaaaaggaaatttattgacgacagaagagaccagccttttgacaagcgattgcgtttcagcgtgaggcaaacagaaagtgcctacagatacagagatattgtggtcaggaagcaggatggcttcacccacatcttgttatccacaaagtcctcagagaataactcactaaatccagaggtaatgagagaagtccagagtgctctgagcacggccgctgccgatgacagcaagctggtactgctcagcgccgttggcagcgtcttctgttgtggacttgactttatttattttatacgacgtctgacagatgacaggaaaagagaaagcactaaaatggcagaagctatcagaaacttcgtgaatactttcattcaatttaagaagcccattattgtagcagtcaatggcccagccattggtctaggagcatctatattgcctctttgcgatgtggtttgggctaatgaaaaggcttggtttcaaacaccctataccaccttcggacagagtccagatggctgttctaccgttatgtttcccaagataatgggaggagcatcttgggaaaaatagtaactttacagtaaagaaacctggcagctaccaccttgccgagtggcagagttcacagaaatagacaaaagccaacatgaagcactgaggggracacagtcttcgtcgctgcgggggaattctctgaaggtgcascwactcagtctcatcatgaagaacgttaggcccagactgggggggcartcctgcaaaacccc

SEQ ID NO: 13 - DNA, 446 bp, Homo sapiens
gtgaatggacaagttgtgtgcgctgttcctcacaacttagagagtaaatctccagctgccccgggtcagagtccaacagggagtgtatgctacgaacgtaatkgggaagtgttttatctgacttacacccckgaagatgtcgaagggaacgttcagctggaaactggagataaaataaactttgtaattgataacaataaacatactggtgctgtaagtgctcgcaacattatgctgttgaaaaagaaacaagcccgctgtcagggagtagtttgtgccatgaaggaggcatttggctttattgaaagaggtgatgttgtaaaagagatattctttcactatagtggatttaagggtgacttagaaaccttacagcctggcgatgatgtggaattcacaatcaaggacagaaatggtaaagaagttgcacagatgtcagactattc

SEQ ID NO: 14 - DNA, 1256 bp, Homo sapiens
gcacgaggtcaaatggttcaacgtccggaatggttacggattcatcaacaggaatgacaccaaggaagatgtctttgttcaccagacagctattaaaagaaacaaccccaggaagtttctgcgcagcgttggagatggggagactgtggaatttgatgtcgtggaaggagagaagggcgcagaagccactaatgtaactgggcctgggggagtacccgtgaagggcagccgttatgcccccaaccgacgtaagtcccgccgattcatcccccggcctccctcagttgccccaccacccatggtggcagagatcccctcggcggggacaggacctggcagtaaaggggagcgggctgaagactctgggcaacggccccgacgatggtgccccccacccttcttctaccgacggcggtttgtgcgaggcccccggcctcccaaccagcagcagcctatagagggcactgacagggtagaacccaaagagacagccccattggaggggcaccaacagcagggagatgagcgagtccccccgcccagattccggcccaggtaccgaaggcctttccgcccaggccacgccagcagcctaccacagaaggtggggatggtgagaccaagcccagccaaggtcccgctgatggttcccggcctgagccccagcgcccacgaaaccgsccctacttccagcggagacggcagcaggcccctggcccccagcaggcccctggcccccggcagcccgcagcccctgagacctcagcccctgtcaacagtggggaccccaccaccaccatcctggagtgattccaactcaactcaaaggacacccagagctgccatctggtatctgccagtttttccaaatgacctgtaccctacccagtaccctgctccccctttcccataattcatgacatcaaaacaccagcttttcaccttttccttgagactcaggaggaccaaagcagcagccttttgctttttcttttttcttccctccccttatcaagggttgaaggaagggagccatccttactgttcagagacagcaactccctcccgtaactcaggctgagaaggaaccagccagctcttacctcctcctggttgcttttcttgcccccaccccaagtttatttttgttttcccccggccccctacctctgaagccattttatgatctgtcatgtgccacctgagcctccagtaaaaacaaaaacaggctttcctgtgaaaaaaaaaaaaaaaaa

SEQ ID NO: 15 - DNA, 766 bp, Homo sapiens
  SITE (692): n equals a,t,g, or c
  SITE (761): n equals a,t,g, or c
ggaagtttctgcgcagcgttggagatggggagactgtggaatttgatgtcgtggaaggagagaagggcgcagaagccactaatgtaactgggcctgggggagtacccgtgaagggcagccgttatgcccccaaccgacgtaagtcccgccgattcatcccccggcctccctcagttgccccaccacccatggtggcagagatcccctcggcggggacaggacctggcagtaaaggggagcgggctgaagactctgggcaacggccccgacgatggtgccccccacccttcttctaccgacggcggtttgtgcgaggcccccggcctcccaaccagcagcagcctatagagggcactgacagggtagaacccaaagagacagccccattggaggggcaccaacagcagggagatgagcgagtccccccgccagattccggcccaggtaccgaaggcctttccgcccaggccacgccagcagcctaccacagaaggtggggatggtgagaccaagcccagcaaggtcccgctgatggttccggcctgagccccarcgsccacgaaaccggccctacttcagcggagacggmagcargccctggccccacaggcccctggccccggagccgcagccctgagactmagccctgtaacagtgggacccacacacatctgagtgatcactactaaggnaccagagtgcattggattgcagtttcaatactgactacagacctgtcctttcatattatgataacacantttac

SEQ ID NO: 16 - DNA, 498 bp, Homo sapiens
ggcacgagcagctcaagcacctggagtccttttacgaaaaacctcctcctgggcttatcaaggaagatgagactaagccagaagattgcataccagatgtaccaggcaatgaacacgccagggaatttctggctcatgcaccaactaaaggactttggatgccactggggaaagaagtcaaagttatgcagtgttggcgttgcaaacgctatggtcaccgaacgggtgacaaagaatgccctttctttatcaaaggcaaccaaaagttagagcagttcagagtggcacatgaagatcccatgtatgacatcatacgagacaataaacgacatgaaaaggacgtaaggatacagcagttaaaacagttactggaggattctacctcagatgaagataggagcagctccagttcctctgaaggtaaagagaaacacaagaaaaagaagaagaaagaaaagcataagaaaaaaaaaaaaaaaaaaaaaaaaaaaaaaaaaa

SEQ ID NO: 17 - DNA, 545 bp, Homo sapiens
  SITE (84): n equals a,t,g, or c
  SITE (518): n equals a,t,g, or c
  SITE (533): n equals a,t,g, or c
  SITE (540): n equals a,t,g, or c
  SITE (541): n equals a,t,g, or c
gaagagctgaatcagctgctaaaaggagtcaccatagccagtgggggtgtgttacccaacatccaccccgagttgctagcgaanaagcggggatccaaaggaaagttggaagccatcatcacaccacccccagccaaaaaggccaagtctccatcccagaagaagcctgtatctaaaaaagcakgaggcamgaaaggggcccggaaatccaagaagcagggtgaagtcagtaaggcagccagcgccgacagcacaaccgagggcacacctgccgacggcttcacagtcctctccaccaagagcctcttccttggccagaagttgcaagttgtacaggctgacattgcctcgatcgacagtgatgctgtcgttcacccgacaaacactgacttctacatcggtggtgaagtaggaaacacgctggagaagaaaggtggcaaggagtttgtkgaarctgtyctggaacttcggaaaaagracgggsccttkgaagtactggarcttgcttgcagccgcangccattgggcttgcntgccaanntttg

SEQ ID NO: 18 - DNA, 217 bp, Homo sapiens
gcccgggcaggtagatgaaatagtgatgtagcaaaaacctagtaaattctgaatgcttttccacgtagacttatctggaatgtgaacacaactctttggttaatagtaaatgcttaactgtagtcctgagtaggtgcatttctgtctgtctcaataaattttactttgtctgcaaaaaaaaaaaaaaaaaaaaaaaaaaaaaaaaaaaaaaaaaaaa

SEQ ID NO: 19 - DNA, 234 bp, Homo sapiens
  SITE (219): n equals a,t,g, or c
  SITE (224): n equals a,t,g, or c
gttctgtacatgtgatgtttgactgtaccattgactgttatggaagttcagcgttgtatgtctctctctacactgtggtgcacttaacttgtggratttttatactaaaaatgtagaataaagactattttgaagatttgaaaaaaaaaaaaaaaaaaaaaaaaaaaaaaaaaaaaaaaaaaaaaaaaaaaaaaaaaaaaaaaaaaaaaaaaaaagggngggcngctctagggg

SEQ ID NO: 20 - DNA, 744 bp, Homo sapiens
  SITE (3): n equals a,t,g, or c
  SITE (10): n equals a,t,g, or c
  SITE (12): n equals a,t,g, or c
  SITE (639): n equals a,t,g, or c
  SITE (692): n equals a,t,g, or c
  SITE (717): n equals a,t,g, or c
acntaattcntnctatagtgagtcgtattacaattcactggccgtcgttttacaacgtcgtgactgggaaaaccctggcgttacccaacttaatcgccttgcagcacatccccctttcgccagctggcgtaatagcgaagaggcccgcaccgatcgcccttcccaacagttgcgcagcctgaatggcgaatggcaaattgtaagcgttaatattttgttaaaattcgcgttaaatttttgttaaatcagctcattttttaaccaataggccgaaatcggcaaaatcccttataaatcaaaagaatagaccgagatagggttgagtgttgttccagtttggaacaagagtccactattaaagaacgtggactccaacgtcaaagggcgaaaaaccgtctatcagggcgatggcccactacgtgaaccatcaccctaatcaagttttttggggtcgaggtgccgtaaagcactaaatcggaaccctaaagggagcccccgatttagagcttgacggggaaagccggcgaacgtggcgagaaaggaagggaagaaagcgaaaggagcgggcgctagggcgctggcaagtgtagcggtcacgcttgcgcgtaaccaccacacccggcgggcttaatgcgccgnttcagggccgcgtcaaggtggcactttttcgggggaaatgggccgccgggaancccctaatttgggttaaattttctnaaataccatttcaaatatgggattccc

SEQ ID NO: 21 - DNA, 500 bp, Homo sapiens
tgcaggctcaaacctccccaagccatgctaggacctcacacctcggacatacacccttcaacacctcagacacctcagggacttcccaccaggggcaccccaggcgcctcccgatggcctctccctctcaccccgacagtgacgggcagtgaggacatgtgcgtgcacttctttgatgtggagcgggcggccaaggctgctgtcaacaagctgcagggccacagtgcacctgtgcttgatgtcagcttcaactgcgacgagagcctactggcctccagtgacgccagcggcatggtcatcgtctggaggcgggagcagaagtagggtcctgtcggccctgctgctgtcctccatcccacccctcttactccagcctcgtgttgtaaataaagtttcggtggtcatgctgagggccggctcccagctctgccggggacggacagggcagagggcagcgggcagctccaggaacccggtgaaaaaaaaaaaaaaaaaaaaaa

SEQ ID NO: 22 - DNA, 1823 bp, Homo sapiens
acctccaggaggaagcagccagcgcttccctccgagtggcacctgagaaggctgagtgatgacagtttggaatggagacggacctgccccgaccttctcctgtccgatgggaaagccagcatctccatgccccgtgaaggcggtttccacctgcactgcccgatgtcctgaccctggggaacacagcagcacttggggggagtttgaaggctttcgggaatcttcagccaagtctggacaattytcacagtcccttgaactcctcgagggacccacagaaccccagccaccgagaaccacttctgccccaaaagagtgcagttctcaccaaccatgccagggtggaccttgggtgacaaggaacttctgccgtcccaccttctgagcccattctcagctatgagaacattttaaagtgtgcttttcaagaaataacagtccagcaggcagctgaagacgtttccaccatagaccatttcctagaaataagcagtgaagaaaaacctggcgttgaacgtgtacataaattgtgtaacgaatccagaaaactctggagagcccttcagagcatacacaccacgtctacttctcagcgcctctggagcgagtcccgttgccaggrgaacttctttcttgttctcggaatagatgctgcgcagaagaacctttctggaggccagggcacatcatggaagattgtgacctcaaagagcctgaaggactcctcactgtcagcagcttctgtctccagcattgcaaagccctgatccagaccaagctctcggggccgcctggcagcaaacaggggaggctgatgacatgcagccgcttcctgaagaccccctcatgcggaggtggccagcacatcactattccaaggaaaaggatgttcactccacgcaagctcaaattgacactctttaatagcgacgtttgctaaaatcaggaggactttgtacctttatgaggaatttttcattttcttcctggctgggttgatgtggaaaccagagctgtctgtggagctgttttccagaccccaggcccattcctgggatctctccaacaggacctgtcctgtgttctgggcttgtctcgggtctgaccaggagatggaggatgtgtccttggcagagccaaggggagacagaggtttctggatgccatgacaggctgtcggggtccaggtggcactcatgggccccctgccccatgtgaatgctgctggcacctggtggggggttgcccagggatggaccctgggcatggcttctgggctgcttagtccagggggagcaacttgtggccaaatccatgagttcagaggaaaaggggaaggcactgaaacgtcaccagagagacagctgttgagaccgctcagaaaccctctgtctgtcacactctgccctggctgctgtgtggtcagggcaccatgagggtgtacagatgtgctgtgtcctcagagcctcgcaggtgccctcacttactgcctgggcccctgcccagcagcctcaaggacaggcctttgtccctcacggttgtggacaggaggtcgcaccactggcctgcgagagcctctggtgggcccgtggcttcccccagttatctgctaaggaaaactgtgctcttcgaagggcagagccaagaagtcagccctgacttttgtaaaattttactaaataaaaccacctggataaaaaaaaaaaaaaaaaaaaaaaaaaaaaaaaaaaaaaaaaaaaaaaaaaaaaaaaaaaaaaaaaaaaaaaaaaaaaaagggggagggggtcgacgcggccgcgaatccggaccggtacctgcaggcg

SEQ ID NO: 23 - DNA, 193 bp, Homo sapiens
  SITE (20): n equals a,t,g, or c
tcgacccacgcgtccgtgtncagtgaacatcctgggtcactggggaggttgtagcacttcctgcttcctagagatggtcaatgaacttcctggagatgttaaataaacttcctgggtcactaaaaaaaaaaaaaaaaaaaaaaaaaaaaaaaaaaaaaaaaaaaaaaaaaaaaaaaaaaaaaaaaaaaaaaaa

SEQ ID NO: 24 - DNA, 265 bp, Homo sapiens
  SITE (232): n equals a,t,g, or c
  SITE (233): n equals a,t,g, or c
taaagcatttttatatctcaactaagataacttttagcacatgcttaaatatcaaagcagttgtcatttggaagtcacttgtgaatagatgtgcaaggggagcacatattggatgtatatgttaccatatgttaggaaataaaattattttgctgaaaaaaaaaaaaaaaaaaaaaaaaaaaaaaaaaaaaaaaaaaaaaaaaaaaaaaaaaaaaaaaaaaaaaaaaaaaannaaaaaaaaaaaaaaaaaaaaaaaaaagggggg

SEQ ID NO: 25 - DNA, 332 bp, Homo sapiens
  SITE (302): n equals a,t,g, or c
  SITE (306): n equals a,t,g, or c
  SITE (328): n equals a,t,g, or c
ggggcccacacccaggtgggggcccatggggtggagacagagaggtggctttaaaaaacacagctgtactaattcttcactccatgggcccacacccaggtgggggaggaggaagccactgcatctgttggctcagggccccagcctgtgcgagcagggcgcctgggctgttgtgtctmctgtctgtgccgatctctattaaaggactccctcttggtgggcaaaaaaaaaaaaaaaaaaaaaaaaaaaaaaaaaaaaaaaaaaaaaaaaaaaaaaaaaaaaaaaaaaaaaaaaaaaaaaangggnggccgttttaaaggatccaagnttac

SEQ ID NO: 26 - DNA, 291 bp, Homo sapiens
gggtcgacccacgcgtccggcattggattgctcagaataaagtgtctgttagaaaaacctttagatatataaaagattaatttgtgcacatctaaatgttttatatatctaaaggtttttctatcatgcattggattgctcagaataaagtgtctgttagacttcgttttggtaaataaattctccataatgtagattaataatataaaagtctttaatgacacaatatatctatatagcctcactgtataattcagaaataaaaattgattctgcaaaaaaaaaaaaaaa

SEQ ID NO: 27 - DNA, 640 bp, Homo sapiens
  SITE (631): n equals a,t,g, or c
  SITE (635): n equals a,t,g, or c
  SITE (636): n equals a,t,g, or c
  SITE (637): n equals a,t,g, or c
  SITE (640): n equals a,t,g, or c
gcttttccaagtttcagtgtcacagattgcatatggcatgataatacatcacattcatttccctcaagtttgtttttttttttgacaggtagttaacaaaaaatgtgcaaattgccataattctctaaaatagtatttcttgcattcattaataatgaaaaaagcaaggatggtcagattattgtgtttgatgtttttcaacccctttttttttttttttcaatatagccggtatcgtatatggtttttgcgattttgaycctttttttttttttttttycctttggagatggaatctcgctctgycgctcaggctgraatgcagkggcscaatcttggctcactgcaacctytgcctccccggttcaagkgattcttytgcctcagcctggcctacatgaggaaaccctctctgctagtaatacaaaaattasccggscatggkggggcatgcctgtaaccccaggtacttgggagggtgaggcaggagaatcgcttgatcctgggtggtggaggttgcagtgagctgagattgtgccattgcactctagcctgggcaacgagagtgaaactccatctcaaaaaggaaaaacaaaacaaacaaacaaaaaacaccaaaaaaaaaaaaatnaatnnnaan

SEQ ID NO: 28 - DNA, 155 bp, Homo sapiens
  SITE (74): n equals a,t,g, or c
tgggaatcacyatagggagagagctatgacgtcgcatgcacgcgtaagcttgggcccctcgagggatcctctanttcggccgccctttttttttttttttttttttttttttttttttttttttttttttttttttttttttttttttttttgga

SEQ ID NO: 29 - DNA, 1456 bp, Homo sapiens
  SITE (988): n equals a,t,g, or c
  SITE (1447): n equals a,t,g, or c
  SITE (1454): n equals a,t,g, or c
tcgacccacgcgtccgtggaattcaggtcagaggtgagtgatgtggccagtgagggcagccacacagatcggccgccgggactgcagggcgctgcccaccggcgctcattttatcaccagcagcccaggcttaacctgatccttgcttgtctgtcaagtgactgttagcggccccaggagtggaagggacatggaggagatactcatcttcagagagaaccactgggttttttcacacctctgtccacatgcgcctcctgtctcttgagctcaccacttggccttggccagtttttggtttatgccaacatgtttcctcttcacaagagacaaaaatcctgaatatttaatccaaattattctgatccctgaacccagaggtgtgggacattttatgtggacagtgaattcatgaagactccagacatctggttctgttgtttgagatagaatgtatgctaatcctctttgtttttagttattctgcttaagcaaatgtcaaccccaaatgcacttttttctcctgtgagaaaagcatttaaaacacagcataatcaggaacatttaatttccatttttaaagcgtgtggtaataaatttaatgtgtcactagtgcattagtttatgtattaagatatttgcgcaggccggcgtttctgagaaaggtgtttgaaacacaggatttctaatattaagtgttaagtgttccatcctcatgtctcaacctttgacctctgtagataatgacctcaccacatcctgcaatccttcaaagagcatctttctgyaagatttattttgtggacattcattctccagggaggcttttggactcaaactcctgagatttgagaaactcttagctgcatcctggtgtcccagggaagaccagctccctgtgagccacggtgccagttcctcaggctcttctgtcagggtctgggctttggtttgctctcccggaggccagkgctgggggttagggtgnagaagtgcctggccctttgcccatctgtctgcttacctattctgcaggtctggagctgctgttagctcagggtgcttttgtgtgaattagaaaaaggggcctcatcaaccaggtgagtagggagatgcagccagcgccaggacctgtggctctgtgagcgagtagaggcagggtttagctcccacttgccttttgtggtcacttgtctagtgaaatgcacattctgggcagtggtacatgtgctcctgtctgggtgccatccccgatacctctttggggaccgctttctattggtgcttcttccttcttcaaactctccctcccatgatctggaatttcatatcttaaaaaaaaaaaaaaaaaaaaaaaaaaaaaaaaaaaaaaaaaaaaaaaaaaaaaaaaaaaaaaaaaaaaaaaaaaaaaaaaaaaaaaaaaaaaaaaaaaaaaaaaaaggggggnccgtttnaa

SEQ ID NO: 30 - DNA, 325 bp, Homo sapiens
tcgacccacgcgtccggtcgcagtttccatgtgtttcaggatcttcgggctgtcgttagacaggttaatgaagaacacttctcaacagtttcctttttgttttcctttataattcactaaaataaagcatctattagtgtctgatttaggaatgtaaaatgattctgtattaatgtaaataagattatctattgcaaaaagatatttcaaacctaaaaaaaaaaaaaaaaaaaaaaaaaaaaaaaaaaaaaaaaaaaaaaaaaaaaaaaaaaaaaaaaaaaaaaaaaaaaaaaaaaaaaaaaaaaaaaaaaaaaaaaaaaaaaaa

SEQ ID NO: 31 - DNA, 655 bp, Homo sapiens
tcgacccacgcgtccgctctttgcagtgaatttggaatggaaggccaggtttctataacttttgaacaggtactttgtgaaatgactcaatttctattgtggtaagctcattggcagcttagcattttgcaaaggaattgctttgcaggaaatatttaattttcaaaaacataatgattaatgttccaattatgcatcacttcccccagtataaatcaggaatgtttgtgagaatcacttgaacccgggaggcagaggttgcagtgagctgagattgcaccactacactccagcctggatgacagagtgagacttcatctcaaaaaaaaaaaaaaaaaccaaaaaaaaacaacccggtagcattgtcccttccccactgacaaacttatcaaatccagaagctttagagtttcgtctctaattatttttctcctgaacaaaattacccaagtcaaaacaaaatgtatttttagaattacggcagcatacgacctgaattttgtgagtttcgtggctttatcttaaatcaccatttccctaaaaatggtttctttctccttagaaatgctggtggcaacttgatgaaacagccaaatgcaccagggcaggtcactttcccattacactgattccacaattaaaaaaaaaaaaaaaa

SEQ ID NO: 32 - DNA, 613 bp, Homo sapiens
gctcgtgccgcttctccctcctcctcctccccccgctactatccgcggcccagagaactgccgcttgccgccattgacacgcacagatagaacccaaagaaaggcaaagagtcctgcccggcaccggcgccgcgtgggccaaacctgcgcccgtggaggggcgcgcagagggcaccgggcgccgggagcaggcggcgcagcaccagcattgtgttagtgccgggaggccactgtgtcagcaagctgagagggaaactgaagcaagatgtcgggccggagtgggaagaagaaaatgtccaagctgtcccgttcagctagggcaggtgtcatctttccagtggggaggctgatgcgttatctgaagaaagggacgttcaagtaccggatcagcgtgggcgcccctgtctacatggcggcagtcattgagtacctggcagcggaaattctagaattggccggcaatgccgcgagggacaacaagaaggcccggatagccccgagacacatcttgctggcagttgccaatgacgaggagctcaaccagctgctaaaaggagtgaccatcgccatggaggcgtcctgccagaattcaccccgaactgctggccaaaaa

SEQ ID NO: 33 - DNA, 295 bp, Homo sapiens
tcgacccacgcgtccggagctagcatgcctggccagggattaaaatattcaaacatgttgtgtgtacccagatatgctgttaatttaggaaaaacagtacaatttctatgaagtggttgtgactattttctgtagtcaatacagttgggatatctgatctatttctctgtctactttggaaatgattgcataataaataaaattttactgtttttttaaaaaaaaaaaaaaaaaaaaaaaaaaaaaaaaaaaaaaaaaaaaaaaaaaaaaaaaaaaaaaaaaaaaaaaaaaaaaa

SEQ ID NO: 34 - DNA, 444 bp, Homo sapiens
ggatataaccctatgcattaaaagccctttttgtaataagtttaatatcctaaaaggaatgccaattaagttttgttaactgggtcatcaacttatcctagtacctcagtgttcattcctgttacctgcatatttttttaaaagaaatagctgttattaatgcctttttgttttccattgagtgtacactactgaataagkgtaggagttttatgtttmccatgtgagtcctgcaacmctaaagatattttgaatatcagtcatgatggcaatttytgtataaaaragccttaaatggaacattgttttgagatcaaactccccmccctcmcaaaaatggccmcgttgcaataaaaattgtggcatattaaaaaaaaaaaaaaaaaaaaaaaaaaaaaaaaaaaaaaaaaaaaaaaaaaaaaaaaaaaaaaaaaaaaaaaaaaa

SEQ ID NO: 35 - DNA, 243 bp, Homo sapiens
  SITE (1): n equals a,t,g, or c
  SITE (211): n equals a,t,g, or c
ngaccatcccggatctagctaggcttttgcaaaaagctatttaggtgacactatmsaaggtacgcctgcaggtaccggtccggaattcccgggtcgacccacgcgtccgtagttctagatcgcgagcggcctccatgactttttcaaaaaaaaaaaaaaaaaaaaaaaaaaaaaaaaaaaaaaaaaaaaaaaaaaaaaaaaaaaaaaaaangggaaaaaaaaaaaaaaggggggggggggggg

SEQ ID NO: 36 - DNA, 226 bp, Homo sapiens
tcgacccacgcgtccgtttgtatttgtaattttatgacatttcgaagtttctgtgtcttaactctttttaattaattttctgcacgttgcttttttctctttgtttttaattccatacagagtattcaattcttgaaacacattaaaataatttgcttgctaaaaaaaaaaaaaaaaaaaaaaaaaaaaaaaaaaaaaaaaaaaaaaaaaaaaaaaaaaaaaaaaa

SEQ ID NO: 37 - DNA, 474 bp, Homo sapiens
  SITE (24): n equals a,t,g, or c
ctcactgccaccctctgccctccngggttcaagcgattcttgtgtctcagcctcccgagtagttgggatttacaagtcaattttttttttaactaaaactacagaatctatttttcttggtctcatactcagttttttatgtagtcacttagtaaataacctaatttgcttgttttctccacactaattttagggtgaattcctcatttcgcttttcagatcatggggtgagggggatggttgtgtgtgtgaggaactgaggaatcagatggaaaacaatgcctctgctcctttgagtataatcagtgatatttgaggttccagggttaaatgctgcatttttatttctgacgttcgtaccttaaaatatttgaagaaaataaactatttcattgttgtcaraaaaaaaaaaaaaaaaaaaaaaaaaaaaaaaaaaaaaaaaaaaaaaaaaaaaaaaaaaaaaaaaaaaaaaaa

SEQ ID NO: 38 - DNA, 245 bp, Homo sapiens
gggctgcaggaattcggcacgagcggacgagaatacctgctttttgttttggatagtaccttgtctgtataagaagctggcctttccatagagaggccctggagtctaaaattatgagaacaattaatttatttgtgtcttctattatgatctcgttttgacaataaaaatccttactactttctcaaaaaaaaaaaaaaaaaaaaaaaaaaaaaaaaaaaaaaaaaaaaaaaaaaaaaaaaaaa

SEQ ID NO: 39 - DNA, 1317 bp, Homo sapiens
ggcacgagaaaaaaggtagatcttgaatgtgttgtagcacgaataaattgctgtacttcattaagcttcattgccaattagctaggaattgttaagcacattgcagattgttcttggagaattctggagttgttatgaacatgaataccaacggaaaaccttaactgaatctaaaagaaaactattttgaagatggtggtgagctgcaaaatagctggatggatttgaatgattgggatgatacatcattgaactgcactttatataaccaaagcttagcagtttgttagataagagtctatgtatgtctctggttaggatgaagttaattttatgtttttaacatggtatttttgaaggagctaatgaaacactggacatataattggtttaaacataaggggaattaagtctttgtagtctgtcatttttttaagtggatcctcttggatgcgttattttctcatcagctggctctgatcatgaatttgttgtaattttatgttgtactcagtgcatttaagaaatggtagagtattttaatcctattacttgactaagagtgtgaaggtagtactttttagagtgcactgagtgcactttacatctttatttaaatttttttttaacatcttatgtttacaggcttcctgtttgatgaagatagcaacggaaaactcaaaatggtggcagttcttattaccagttgttagtattgtttctggaaactgcttgccaagacaacatttattaactgttagaacacttgctttatgtttgtgtgtacatattttccacaaatgttataatttatatagtgtggttgaacaggatgcaatcttttgttgtctaaaggtgctgcagttaaaaaaaaaacaaccttttctttcaatatggcatgtagtggagtttttttaactttaaaaacatcaaaaattgttaaaatcattgtgttatctagtagtttataattatcggcttatatttccccatgaatgatcagaactgacatttaattcatgtttgtctcgccatgcttctttactttaacatatttcttttgcagaatgtaaaaggtaatgataattagtttatataagtgtactggctgtaaatgatgctaaatatactttatgcaattaagggcttacagaacatgttgaaactttttttacttttattgggaataaggaatgtttgcacctccacattttattgcttctggatgtgaaatcatgtaattatttctgctgttatataaagtgccatacttttaataaaggaaaatgtacatatgaaaaaaaaaaaaaaaaaaaa

SEQ ID NO: 40 - DNA, 288 bp, Homo sapiens
ggcggaccacctccttagggacagaccctggcaggtcgctgcccaccgagatttcctcaagtgtgcatagatctgagaggagtcgggagtcgagactcgagattccatcatagcgtaggtgtgtggggttgggagccccctgatgggcttgtctgtgtttgcaccttgtcctgtgtctgaggtcctgtgactgtaccctcctttgccctgggacatctgtatctcttggctttgtaataaatgctgcatactttcaaaaaaaaaaaaaaaaaaaaaaaaaaaaaaaaa

SEQ ID NO: 41 - DNA, 1341 bp, Homo sapiens
ccacgcgtccgcccacgcgtccgcttacacatactgttcagcagcttatcccctcccctctaacagatcatgaacatttttccatgtctgtatgacatggtatttcattttactgttgtatcatcatttatcttgccagtcaccagttttcatacatttaagttgtcaaaggttttgctataacaaataaagaaacaacatcctcatatatagatttttgtttattcagtgttactaggtcaaagaatgtaaacatttaaaatgtttaagagattattatgccaaattatcttctaaaaggctataccaattaaaattctcaccagccgtacatgaggatgaaatgaccctatatttaagaagaattagtgaaatcctattgttctaaaattgagcaagactctgggcaactagtagtgaatttatatgaaaagctagatccattcttctccctcgtgggcctgtgagttcatttcatagaaatcctttcttctttgggggaagctattggttgaagaatagttaacatctttattcaggctattcccagatctcttctgaaatctgtaggtccttggtgctggctccgtctcaggtgagtttttcttcattaagtgcactactcatgtgaacataatactacagagaattgccttctctgtgatagtgtttgtgctttggagtacatgtatcaaattcatctgtgaaggaacctgggaaatattatgaatttagtcataatatttataagtaacttatgtttgtaagtaatgtttataagtaaccaatttttaaaaacagtttttaaggccaatatatttgatgttgttactgctattaaatcaaggttatcagggctgggtagggtagctcatgcctataatcccagcactgcgggaggatcgcttgaggctgggagtttgagaatagtctggacaacatagcaagatcgtgtctctacaaaatattaaaaagatatccggggctgggcacagtggctcacgcttataatcctaacactttgggaggccaaggcaaacagatgagttgaaatcaggagttcgagaccagcctggccaacatggtgaaaccctgtttctactaaaaatacagaaattacacctgttatcccagctactcaggaggttgaggcaggagaatcacttgaacccaggaggtagaggttgcagtgagccaagattgtgccactacatttcagacctgggcaacagagtgagaccctgtctcaaaaaaaaaaaaaaaaaaaaaaaaaaaaaaaaaaaaaaaaaaaaaaaaaaaaaaaaaaaaaaaaaaaaaaaaaaaaaaaaaaaaaaaaaaaaa

SEQ ID NO: 42 - DNA, 266 bp, Homo sapiens
tgtaaaaccaacagataggccatcccatggcatcttctgagcatgtagcttttccattccaccagaaatataatttgcctcctgaggttgctgatttttatttttcttattttcacaagaaataactatttcttgaaaaacaaagctgaatatcttaaagcaaataaagacctgagaaccttccaaaaaaaaaaaaaaaaaaaaaaaaaaaaaaaaaaaaaaaaaaaaaaaaaaaaaaaaaaaaaaaaaaaaaaaaaaaaaaaaaa

SEQ ID NO: 43 - DNA, 352 bp, Homo sapiens
gataaaactgatttgttttttacagccaaacctctgtcagttttatgtgacaccaataactattactgtttcagtgttttaaaactgatttgttttttacagccaaacctctgtcagtcagaggcattcattagttttatacatgtaatttgaaaatcactaaacctcgttttctcagcagcaataatttaagaggcttcaaaaatataatttcactcttatttagtattttttcctgggggcatttttacgtaatttttttatgaaaagacaaatgcatgttgagataacttctgggattaaaatagtcttttgctttaaaaaaaaaaaaaaaaaaaaaaaaaaaaaaaaa

SEQ ID NO: 44 - DNA, 1294 bp, Homo sapiens
  SITE (1269): n equals a,t,g, or c
  SITE (1286): n equals a,t,g, or c
gggactgcgtcctcagctcagctttaggactgtgacgacaaagtcttggagatgggttcagaaccaaagaaacaaactctaaactaggcttgaaggaagtgaatttcaatcagcgtttagactagatcaagattgagagctcaggatatgcttctgaggcccttccttctgggcttcattgactagccgccatagcatgggtcttgagaaaaattgccccagccgtctgctgctcctgatcctggtcagtgtgcaaaaacagccagtgaaaagtgccctccaaaagtagctcgggaaggcaacccagacattatttgggaagacaccattgttttattagtggctaagtgtgttttaaatttaaattagaactatgtgaaaaaacaatggtaagtaaatcactttttgttaaagacctttctgggtacatctgttctttaaatatattgatatttaaaatagaaaatattgcccactgtgcctggcctctatattgatatttttaattaaaattccaaaagttagacaattgaagtctaaaaagaatggaacatacaaaatttctgagtgcagtttaaaacattgagtgtaatttgtaagtttcccttaaaataattgtttgaaatttgcttacatagaatcagatttgtaagttgaactatattcttcagagaaaaacaggaatttgaattttaacttcaatacatcgaatactaatttttaaaatcaataagacaaaacaactcttgaatcttttctgtatacagaaatccctctcaagggtacaaaaaaaatcacactgacagaaaacatattttgctgtttgtaccttgacacggcttaactggtggcaaaatgattcctgtgttctgcctgctactatgtagttgcgtagttatcctctaccaccccccaccccatccatgccctgcagctggtgtagatacacaggtgtagagcatgctcctatttttaatccagttacttccgataagagcaggactttgccctttccaccccactccccacctcaagcccctgatgaaggagtttcctttaggtctgtcttctccgaattcctttaggatttaaagtccataccttgcaatttagcacttaatgatatgccctctcttcacagtctctaatactttcaacatgtgtgagtcttgccttcccaagcagactaggaattcttttcttccttattcccacatctttgttccagccagccatctaacagacaaaaaaaaamaaaaaaaaaaaaanaaaaaaaaaaaaaaaanaaaaaaaa

SEQ ID NO: 45 - DNA, 1211 bp, Homo sapiens
  SITE (1): n equals a,t,g, or c
  SITE (4): n equals a,t,g, or c
  SITE (31): n equals a,t,g, or c
  SITE (44): n equals a,t,g, or c
  SITE (115): n equals a,t,g, or c
  SITE (1205): n equals a,t,g, or c
ncgnaatgggccggtaggcggtgccggtggnaggtctatataancagagctcgtttagtgaaccgtcagatcgctggagacgccatccacgctgttttgacctccatagaagwcnccgggaccgatccagcctccggactctagcctaggccgcgggacggatamcaatttcacacaggaamcagctatgaccactaggcttttgcaaaaagctatttaggtgacactatagaaggtacgcctgcaggtaccggtccggaattcccgggtcgacccacgcgtccggaagcacttaggatattccctttatgttagggatataaaatgtcatgaaaatttgtctagatttgttttcttttatcagtttgggaaatttgatgattccaaatattttctgtcttcattttgtaggagtacaatcacctagatatagatattttatgtcttttctctcttagctcaaattctcttctcttcgcctttttgctctgtgttccaggaaaattctttgactttatcttcctgtttttctgatggtaatcatgactgacatttatggaagctttttttgcaatcttattatatagcagatttcttgttttataggtgctatgtttcaaaaggcagtagaacgtaagtctaagaatagagattttagaacacctgggtgcctattttggctcagtcacttactgtgtgacattagacatgtttcttaatttctctgaatctagagctctctatctgcttttttataaggacactaggaacattccattagattaagcatgtcaaattctcagttgagagcatggcacatagtaagctctaaataaatgctagcattttgctttcttgaacttcactgatgaatataatctcagtttttctatttgtctttctcttttacggtggcaatatgtttaattatttccaattttctgtttatgtttgagaatatggaactagattcatcatctaggtaggcagtataattttgttctctgctattacacacacacacacacactttctataaaacttgaaaatagcaaaaaccctcaactgttgtaaatcatgcaattaaagttgattacttataaatatgaactttggatcactgtatagactgttaaatttgatttcttattacctattgttaaataaactgtgtgagacagacaaaaaaaaaaaaaaaaaaaaanaaaaaa

SEQ ID NO: 46 - DNA, 981 bp, Homo sapiens
cacagacagagcatattttttcctttcactgggaggcaggaatgactggagttgttcaaacaccggtccgttcctgcaattcctatgataaagttgaactaccagaggaatttttttttttttttttacaactgcggaaatgaaaaagtaaacaagactgggactgcattggtatttaggctccagctttttgttgttgtttttgtctttccctttttttaagccattgggctaggagcctgaagggaccatataatatgaaaaacgctgagaggttttattagccaataaaaaaaaaaactgagttcctattaaccacttaactccttgctgaagttcaaacttgctttctccttggatccttctctccctctcatgcccacgaggaatgacggttggttcaccaatctttccctgcacaacctgagctcacagtttgtgctccagaaggtgtggttgagaatcgtattcaataataatctctgtatttctcatctgtgaagccataaataagatttctgtaaggagccaaatgttctacgcccccaaatctacacacacaaagactctttaagcactctactaaaaaagagtaaagtcattgtgatttctaggattttaaatactaaatgatggttagggagaacaaaatcaggctgaagcatttctgggataaataatgatcccacaaaacgctcctctcatttgggggcagaagaatgaagggaaactcacagagaaacagaaaatgaaattggtccaactatttcactgctggagatagatggagttaggatacataggtgacttggtttaggaaagagaggatgtcgaaggtgatttaaatcctaacactgttttattaatcgtgccacaattctacatgtcatgtgattttgttatctgctttttgctgcttttaaataaatttgtacttttctatcaatccatcataaaaaaaaaaaaaaaaaaaaaaaaaaa

SEQ ID NO: 47 - DNA, 317 bp, Homo sapiens
cccgcgtccggtccaatacttaaagtttgaagcaggttaaatattccttacctcccatactacatctcatgatgtttgcatggtgcataaaagttttgtaagcctgtagtaatttgaaagattaatttttgaccaatttgaaaaagtttttaagcaagttgaagaaccttgacaaacaagcaaagcgggactgattaactgaattagaaaaaaaaaaaaaaaaaaaaaaaaaaaaaaaaaaaaaaaaaaaaaaaaaaaaaaaaaaaaaaaaaaaaaaaaaaaaaaaaaaaaaaaaaaaaaaaaaaaaaaaaaaaaaa

SEQ ID NO: 48 - DNA, 384 bp, Homo sapiens
  SITE (6): n equals a,t,g, or c
  SITE (25): n equals a,t,g, or c
ggggcntaactaatgcaaaataccnatagctggtatgcctgcaggtaccggtccggaattcccgggtcgacccacgcgtccggttttgagttcttaactgatcgaatgaaggattcaaaattaaccactccaaggggggattgaaggaagaaccactcttaatggacaaaaagaaagaaaggggagggagtaacagggatatgagctctagccgcccaagctagcaatggcaacccttctgggtccccttccagcatgtggaagctttcctttcgcttcattcaataaacagctgctgctcaaaaaaaaaaaaaaawaaaaaaaaaaaaaaaaaaaaaaaaaaaaaaaaaaaaaaaaaaaaaaaaaaaaaagggggggtttttt

SEQ ID NO: 49 - DNA, 425 bp, Homo sapiens
  SITE (392): n equals a,t,g, or c
gccccaggaaatttttttttttttttttttttttttttttttttttttttttttttttttttttttttttttcaggagagtaagtttactaacctgccaggctgcttcaccacagtcaaaggaggcagccctgagcttacaaaatgagggttttatatgggggagagagaccctggggttgtttgttggttaaccttaccacatatcatctcgtgaccaggttacaatataggaatttacaagagggtgtaacttaggtttatccctcagtcagcgggaggcagacttggcaacggaagctagcatcataaaatggtgcagtaatagaagtaactggaccaggaagaggaggcatctgctccaatgatgtcatagccattggtggccacggngggtgtggggctggtcatgcagccgtgtgtcag

SEQ ID NO: 50 - DNA, 222 bp, Homo sapiens
  SITE (11): n equals a,t,g, or c
  SITE (219): n equals a,t,g, or c
tggtggttttnctagctgctatggaaaggtttgttcacttatgagattaggacttttcttaagttcctcattaaatatgaacctaaggcatacccatcatttaccttgattcccatataatttgtgtaagtcatatataagtccattgacaaaaaaaaaaaaaaaaaaaaaaaaaaaaaaaaaaaaaaaaaaaaaaaaaaaaaaaaaaaaaaaaaaaanaaa

SEQ ID NO: 51 - DNA, 219 bp, Homo sapiens
ggcacgagctgacaggggccctcgtggcttctcattttccattcccttcactgtggctaaggggtggggtgaggggatggagagggagggctgcctaccatggtctggggcttgaggaagatgagtttgttgatttaaataaagaatttgtcatttttgaaaaaaaaaaaaaaaaaaaaaaaaaaaaaaaaaaaaaaaaaaaaaaaaaaaaaaaaaaaa

SEQ ID NO: 52 - DNA, 1214 bp, Homo sapiens
tcgacccacgcgtccgtaaacttaatatgctggtattgtttattcattttatatgaatattcattgaaaatatattgtgtatatattttcaatgaatattcatatatgtaatacacagcacttgattacaaaatgtaatttaattatattattgctggcagcattcagttaagagggtactttaaaaaatagaagtcagctttcacatctgatttctgtatgggctgtacttggttaacttgattttagaaaaaggactaacagaattgctaaagaaatgcatccaataaatgaaaaacagtaggaagatcaaatgtttttgtcaaatatattcacaacttgaccagattagctgtcctgtttgtaatgcaatattaatatgtcttttgggaaaaagcctacatatggaataaaataagtattgaagaatttttctttgtaacaatttagtagtcactgtttattgagaaattgttttttattttgtaaaataacatgatgttagtgttgaactcttaaacagaaagaagcttatataacagcttatagaacttgaactactaatatgaaaataagtcatttgaaaaaaatacagtatgtaaaatttgttcattcgttgaggtaatggtgctatgtttttacaaaattgttcctacaccttttttctacttcaggtattttatttcaaccatttccatcaattgaactgttaccattgcctttttctgttgagaaattgcctctgaaaaatagtgctatttttcagcttaagtgttcttaagtgaatgaaattttcaaagtactagatcaccttaaaattatttcacgtactgaagacaattaagtccgttatgtttagagtagaaaatgtttaggttaaagagcatctgtcaacagaatctacaaaaaagattcccttgcatttgaattagttctctattctcctattgctaaatgtgtgatatatagagaggatgtataaaaggaaatggaaatagactatgtacttgtctggtttttgtttgtttttattttggaatgcttataagcctcctttacactgaataaggaagtagtttttgttttcttttgacctgtaaaatacctcacatggttgtttttacacatgaaagaaaaaggtatatgcgaacatacctgatatcaagaggagtatgcaccaaataaattttagctttgataaaaaaaaaaaaaaa

SEQ ID NO: 53 - DNA, 1439 bp, Homo sapiens
ggcacgagctcgtgccgctccaagtagctgggactataggcacgcaccaccatgcctggctaatttttgtatttttagtagaaatggggtttcactgtgttagccaggatggtcttgatctcctgaccttgtgatctgcccgccttggccttccaaagtgttgggattacaggcgtgagccactgcgcctggccatcaggtaacctttatggctctttcaggaaaagtgaaatcagagaggcgtaccctagccacagctgttgtattctgctcttctttcctttttggtgagcttcatgggtggagttatcagtggtctgtactttgtggatattttgcccagcaggaagtattagacacatcagtctagaagcattgtgaaaaggttccaaaacgggagacaaaatttaattcattcctcagttctgaaagtttgtgctttcttaccatgaatagatgaaaacttgaaaaaaatcttgacagtttactaatgtgaatcagatgtaacgtactactaattctacaatgcctttctctttagtcagtattaaaaatcttttttaaagtattggtatgaaaacaaatttttgttgccctgataatggaattttaaaactacccacagtttaagagaaaacataacttggtaaaaaaggtagccaataaaaccacaatttgaaattgataccattttctactcacaatggatgatgaaaaatttcacctttaaatgggtcagaagttgtctttgacatttaccatgaaaaaactacataaaatggctccctggtgaggttacagacacggccctggtgatgggcgttgcaaagttttcactgagcacacagcaatggtatcacctagagaagttcacgcaactttgttgaatgtagttgacttttccaaatttataaaggaaggaagaaggcaaatgttaatttgccaacaacgaatatcctttttctaaatcagatcattccttttttgttagtggcagtttatcctgtaatttcaaatgacgttaagaggtgggattatttgggggttttttttgtttgtttacagatgatctcatttgctgaatgattgatttaagagtaaaattagccactgcgtggctttgtgtatagtaaccggttttgttgcacttgtctgtggctgaaacacttacctgcagtggaaagccgagcaaggaggaggtaaacattggagatgtttgtgaaaatattactcttgctgtgaggttttagtttgttttgaatgagaaaagactaagtaacttaatccatctcaatgtagtgttttaataaaaaaggaacctaatatttgaaatgggtctcagacatgtctacaaatatgggtactatttttatgcccgtgtattttcacatttaataaaaatatttatggtcatatcagtaaaaaaaaaaaaaaaaaaa

SEQ ID NO: 54 - DNA, 307 bp, Homo sapiens
ccgggggtactcttgtgtgtctggctgcttttgctcagcctatctgtgagattcctcttcactgtcacatgtaccagaggtttgttcattttattgctgttcggtgttgcctcgtatgaatacaccacagttggctcactctcctgttgatgggcttttggattggttccctttttttgacaattgtgaataaagctgctctgagcattaaaaaaaaaaaaaaaaaaaaaaaaaaaaaaaaaaaaaaaaaaaaaaaaaaaaaaaaaaaaaaaaaaaaaaaaaaaaaaaaaaaaaaaaaaaaaaaaaa

SEQ ID NO: 55 - DNA, 174 bp, Homo sapiens
cggacgcgtgggcggacgcgtgggtcgacccacgcgtccgcgagaagacgacagaagggtatctgtgatgatcttatcccgaacctgaacttctgttgaaaaaaaaaaaaaaaaaaaaaaaaaaaaaaaaaaaaaagaaaaaaaaaaaaaaaaaaaaaaaaaaaaaaaaaaaaa

SEQ ID NO: 56 - DNA, 267 bp, Homo sapiens
acccacgcgtccgrtttttattctggtatctaatcagattcctaatcatagcccgtaagaaggaatgttactttaatattggactttgctcatgtgctcgtgtccgcatttttttttttcttaaaatcatagccatatggtaaattttctattttgttatggttctcttttattgatgggcatgcagtgggtgttacttggaaatggccaatttttattaaaatatttctggaagaaaaaaaaaaaaaaaaaaaaaaaaaaaaaaaa

SEQ ID NO: 57 - DNA, 316 bp, Homo sapiens
ccacgcgtccgcggacgcgtgggcggacgcgtggggtttctcttccctctccattggaaatcttgctccggaggtccgaaacacgtattttaagcgtgcccttcctcacctcctggagcacccttagaagtattgcctacttatccgggctgagaatccttcatttttgacctggcttttttttcgccctttgggagataaaggtccttctccaccctctaccccctctagagcaaaaaaaaaaaaaaaaaaaaaaaaaaaaaaaaaaaaaaaaaaaaaaaaaaaaaaaaaaaaaaaaaaaaaaaaaaaaaaaaaa

SEQ ID NO: 58 - DNA, 224 bp, Homo sapiens
tcgacccacgcgtccgctggtctctaaatctcctattttgttttcttatcatttttgaaatacagttcccattacatgagttttaaatagattggtgtttcattttgtattatgctactactagatgttgattctctggtattgtaaaataaaatgtgctccaaaaacccaaaaaaaaaaaaaaaaaaaaaaaaaaaaaaaaaaaaaaaaaaaaaaaaaaaaaa

SEQ ID NO: 59 - DNA, 584 bp, Homo sapiens
tcgacccacgcgtccgatttaaaaaaaatctttacatctgccagaaatagggctcatgggagcacgtgggagggtgttcccctcgttcagcacatggaataacactttatgaatacttaatacatataaatcggcatgctaaacattgtaaatttatcatctaacttaatcccaaggaaagaaaagaacttttatcgaggaatgtgggctctttcaaattattaggcccagagaagcattcaaatgatacggcaatcacatcttattctccccctttagagctatgtattcatctgtcaaaactgcctgctattgccacaagtagctatgaattaacctaataacacctcactggacacaacatcccacactctaaggcttaacaatgggtagccaatcactaatcaatgttatttctgtaaatcaatgagaatccgcggcagaactttgtatcagtccaatccttgtccccctccttttttgcctttaaaaatctgcctgtaataaaggccaagtggagctcatatccaaaaaaaaaaaaaaaaaaaaaaaaaaaaaaaaaaaaaaaaaaaaaaaaaaaaaaa

SEQ ID NO: 60 - DNA, 360 bp, Homo sapiens
gggtcgacccacgcgtccgcacagatcgttgttagatctttatttttagccatgcactgttgtgaggaaaaattacctgtcttgactgccatgtgttcatcatcttaagtattgtaagctgctatgtatggatttaaaccgtaatcatatctttttcctatctatctgaggcactggtggaataaaaaacctgtatattttactttgttgcagatagtcttgccgcatcttggcaagttgcagagatggtggagctagaaaaaaaaaaaaaaaaaaaaaaaaaaaaaaaaaaaaaaaaaaaaaaaaaaaaaaaaaaaaaaaaaaaaaaaaaaaaaaaaaaaaaaaaaaaaaaaaaaaaaa

SEQ ID NO: 61 - DNA, 184 bp, Homo sapiens
  SITE (12): n equals a,t,g, or c
tctaaatacgantcactatagagaaakctggtacgcctgcasgttaccggtccggaaattcccgggtcgacccacgcgtccgaaaaaaaaaaaaaaaaaaaaaaaaaaaaaaaaaaaaaaaaaaaaaaaaaaaaaaaaaaaaaaaaaaaaaaaaaaaaaaaaaaaaaaaggggggggggggggc

SEQ ID NO: 62 - DNA, 1336 bp, Homo sapiens
  SITE (1335): n equals a,t,g, or c
  SITE (1336): n equals a,t,g, or c
tccggattcccggtcgacccacgcgtccgaaaagaaggaaaatcttggagggtgggcgtgggaactcaggaccccagagtggcgagtggtgtggggagggagagcctctctcccccttttctgtgtgagaggaactcttagtgtctggtgcagctattaaatgtgcaatgtgtcaagtagcttgttttacacgctacaacatagctcatttgtaacccattgtataagctgtgtatttacaaatataacacaacaatttaacttttccttagaatacaaaaagtcatgcatggtctggggaactatatgcttttccatttttaagtcaggactgcaatactgattccagttaatgagcagctaagatccaatctgtctaatacagtgaccccctagccatccgggcctggcaatatacaattttttttcccctccaagtttgtaacactccccttccrgaaaggcattgtgcaacacaggattatttttaaatgattctgaatttgaattaactttttggagaattctgtgatgcccttagaagaaattggacacgtattgagtgtcacaaagctggggctgggaattgctggtctaatgtttcattagacttaagaacctaaaatttttctcagttgggtggataaaaccactaacgcttagaaactgttttctcatgcagctatgtttctcttatttatgccttgaggactaatttctggttttctagctgttaatgcactgttgaccttcataatggtgccttacgcaagcgatcccttctgtgggggtctcatacaggggtgtgggcgatgcatgctttattaaggctcttgtttcacctggcagtgtactgtatcaacgtataatacagaaaaaaaatctctttaaggtcctccttcacaaagacatagagtgaactccctttacatgtcagtatttgtcaacactttcataattagcacgtacataaagaagtacattctgttcaggtgataactgagcctcaatcaagcagaaactttttgcttgaaattaaaaaaaaatttctattagtgaaatttctttttttttttttttggaagcaccctgttatctaaagaatctttgtaagatttttgtaaaattttgttttacaagattttatttgaaattgttttttgcaagattgttatatttctgtatgaatgtattttttattggaataacataaaagaattcttatcagcaaaaaaaaaaaaaaaaaaaaaaaaaaaaaaaaaaaaaaaaaaaaaaaaaaaaaaaaaaaaaaaaaaaaaaaaaaaaaaaaaaaaaaaaaaaaaaaaaaaaaaaaann

SEQ ID NO: 63 - DNA, 209 bp, Homo sapiens
  SITE (196): n equals a,t,g, or c
  SITE (199): n equals a,t,g, or c
gccgcgccgggcagcccgggagtccggcggtacccgcgcaaactttgtcccagcgccttggctcaccgtgaatgccctgccttgaaaatttggagttttttgtttcctgaaaaaaaaaaaaaaaaaaaaaaaaaaaaaaaaaaaaaaaaaaaaaaaaaaaaaaaaaaaaaaaaaaaaaaaaaaaaaaaaaaagggnggncgttttaaag

SEQ ID NO: 64 - DNA, 284 bp, Homo sapiens
gggtcgacccacgcgtccgggctgcagtgaggccgtgtcattggctcacaaaagtgactcataggtaatttctgtgtttgcattccactgctctgctccctaaggtccttgactttctccccaggaattcacttaaaaagggactgagcattgtgtcaacctgttgcagtgtttttcatatatgtgttcactctaaaaatgcaaataaagactgcttccttagagggtgctcatacaaaaaaaaaaaaaaaaaaaaaaaaaaaaaaaaaaaaaaaaaaaaaaaa

SEQ ID NO: 65 - DNA, 237 bp, Homo sapiens
  SITE (24): n equals a,t,g, or c
tcaatactgactcactatcagagngcaaagcctggtacagcctgcaggtaccggtccggsaattcccgggtcgacccacgcgtccgcccacgcgtccgcccacgcgtccgcccacgcgtccgaaaaaaaaaaaaaaaaaaaaaaaaaaaaaaaaaaaaaaaaaaaaaaaaaaaaaaaaaaaaaaaaaaaaagggcggccgttttagaggatccaagcttacgtacgcgttgcattgc

SEQ ID NO: 66 - DNA, 484 bp, Homo sapiens
gggtcgacccacgcgtccggatccagatccgaatcgaggccaacgaggccctggtgaaggccctggagtaggcggtgcgtacccggtgtcccgaggcccggccaggggctgggcagggatgccaggtgggcccagccagctcctggggtcccggccacctggggaagccgcgcctgccaaggaggccaccagagggcagtgcaggcttctgcctgggccccaggccctgcctgtgttgaaagctctggggactgggccagggaagctcctcctcagctttgagctgtggctgccacccatggggctctccttccgcctctcaagatccccccagcctgacgggccgcttaccatcccctctgccctgcagagccagccgccaaggttgacctcagcttcggagccacctctggatgaactgcccccagcccccgccccattaaagacccggaagcctgaaaaaaaaaaaaaaaaaaaaaaaaaa

SEQ ID NO: 67 - DNA, 478 bp, Homo sapiens
ccacgcgtccgttcccttttttgattaagttggttcagctatggtgctattcagtaggtatcttcagtgtcaggtcccgtagctgaatgccattgttattataattattatttgtaatcacattgtaagcttgaatttgggcttgtacctgcatcttttgtattctgtacatctggttacttagactttgggagtccaatttggtttcagtcatgtatgtctactttgtagtttaagtagacttcatcaactatggtctattttgggtttgtagttttaatttagaattgtgttaaattgatgttttgcatttgacttcatttgacattagttgaagtaaattatttaatttttgaattctggaatttgaacatttactgtaatttggaatataactggtgggaaatacttgaataaagatgacaagaaaaaaaaaaaaaaaaaaaaaaaaaaaaaaaaaaaaaaaaaaaaaaaaaaa

SEQ ID NO: 68 - DNA, 1252 bp, Homo sapiens
cggacgcgtgggtcagacttacatgtgttagctgttttaaagcagacagagcctacgtagatttacattactagataaggcaagaattgagcagtgactaaagcatttgaatagtaacaggttgtaacattgaaagattgaaagtacgggtagtgtgtttttcttggcagtgattttatataatcagcaggaagtacagactgtcctcattttagaatttgtttctgtgaagtttggcatcaccatagtcaccatctttagtatgtccataggtgctgagtggtttagtttttcattttcctagactgtttgtttcaaagtaacttccaagtcaagtcttgaaagttaaattatacataattatacataatctggcaaacaccatgctggctgaaagcctcgtacaatttgtaaagccaaattaatgtgctcagaaatggaaataaggtactatttttgccgtttatactgttgcttactgtcgccaaaataagacagtaacagcctggctcaacttgccttccatagcagtaatgacaaggcactgctgcaataaggatatattgttttgtatgcctgggctaaaggattggatgagctatagagcttcctggtacatttaaaggttaacttttccccctaaccggttgaaatagggaaaactcgctaatcacaatcatcacaaagcaaatataaacaaaattcctagttcccttgcccatgcagctaaaagagttaagacaccagaatagctaggtgcttttcagtttcagttgaggaaaggatgctattcttaaccataaatactctcattttgtctttctttttttaaagggcttacctgttgctttagacaaacatattcttggttttgacacaggagatgcagttcttaatgaagctgctcaaattctgcgattgctgcacatagaggagctcagagagctacagacaaaaatcaacgaagccatagtagctgttcaggcaattattgctgatccaaagacagaccacagactgggaaaagttggaagatgaacacttgaggacttcagcttctcacctacttagtacagttgggaaccatacacttctggcatgtttggaaatcaaaatgtcccattctcgggggaggaagcccagaaaattgggtatgttctagagatttacccccattgcttattgcttttttctttaataaagtttaggaaagtaaaaaaaaaaaaaaaaaaaaaaaaaaaaaaaaaaaaaa

SEQ ID NO: 69 - DNA, 307 bp, Homo sapiens
  SITE (293): n equals a,t,g, or c
ggcacagcggcgctggagagggggcgctgagctgttgggatgagctttgatccaaaccttctccacaacaatggacataatgggtacctaatggtacttcagcagcactgcgtggaaactggggttattgaaaaactgttaacctcttacggatttattcagtgttcagaacgtcaagctagacttttcttccactgttcacagtataatggcaacctgcaagacttaaaagtaggaggtaatctgtcagttctcctttgtaaaaatgtaatcacaaaatttgtcttgcatancaatttgttcatga

SEQ ID NO: 70 - DNA, 536 bp, Homo sapiens
  SITE (111): n equals a,t,g, or c
  SITE (342): n equals a,t,g, or c
  SITE (518): n equals a,t,g, or c
ggcacgagctggccccgtgttcaagggcgtctgtaagcagttctcacgctcacagggccatggcttcatcacccccgagaacgggtccgaggacatcttcgtacatgtttntgacatcgagggggagtacgtgccagtggagggcgacgaggtgacctacaagatgtgccctatccctcccaagaaccagaagttccaggccgtggaggtggtgctcactcagctggccccccacactccccacgagacgtgtctggccaggtcgtgggctcctaggctgagtggttcacaggccagctggcgwgsggttggggagccacacagggtgaacgggcagcagcnggctccatgccccactgccctggctgatgagtccttcggtggcctcagtgtgcacgtctgtctgtccgtctgtgcttgtggctatgagcgtgtgcctccacccaccccacgacccgtgaytactgtgcaagctggccaggaggtaggtggagggcaaggcaccagacctggcttcncgctgtccacttgcctct

SEQ ID NO: 71 - DNA, 762 bp, Homo sapiens
  SITE (656): n equals a,t,g, or c
  SITE (679): n equals a,t,g, or c
  SITE (699): n equals a,t,g, or c
  SITE (732): n equals a,t,g, or c
  SITE (761): n equals a,t,g, or c
aagctctacaagatggcggcggtcggggccgaggcgcgaggaggatatggaatattatcttgtaaaatggaaaggatggccagattctacaaatacttgggaacctttgcaaaatctgaagtgcccgttactgcttcagcaattctctaatgacaagcataattatttatctcaggtaaagaaaggcaaagcaataactccaaaagacaataacaaaactttgaaacctgccattgctgagtacattgtgaagaaggctaaacaaaggatagctctgcagagatggcaagatgaactcaacagaagaaagaatcataaaggaatgatatttgktgraaatactgktgattwaragggcccaccttcagacttctattacattaacgaatacaaaccagctcctggaatcagcttagtcaatgaagctacctttggttgtcatgcacagattgcttctttcaaaaatggtgtcctgctkaagctggagttcttttggcttataataaaaaccaacaaattaaaatcccacctggtactcccatctatgaatgcaactcaaggtgtcagtgtggtcctgattgtccaataggattgtccaaaagggcacacagtattcgctttgcatctttcgactagcaatggcctggcttgggtgnaaagaccttgtgaagattaaagnatgagtttgcatgggatatnttggagggaatcccagggaagaacttgaagacnaggcagtctatgccaccaggggatcacgna

SEQ ID NO: 72 - DNA, 510 bp, Homo sapiens
  SITE (400): n equals a,t,g, or c
  SITE (474): n equals a,t,g, or c
  SITE (481): n equals a,t,g, or c
  SITE (487): n equals a,t,g, or c
  SITE (509): n equals a,t,g, or c
ggcatctttgttccctgcccggccattgttcgtgccgcgcttctagcaacgccgggccggtaaccccctctccctccttgcgcgttccgggtctcgcaagcgcctccaaggtttgtcttgaagcatagctccagctggagggtaccttttaagctgttcaaggtcaagatgaatacaaactcaaaggaggttttatccctgggtgttcaagttcccgaggcatgggaagaacttctgacaatgaaagtggaagcaaaaagtcaccttcaatggcaggaatccagactgaaacgcagtaatccactggcaagggaaatcttccgaaggcactttcgacagctgtgctaccaagagacccctgggaccaagggaggctcttactcgactycagggaactttngctamcagtggtttgaggccacatgtgagcacaaaggagcagatttggrtctgctggtgctgggagcagttttntattccnttcttnccccaagggagctccaggggtng

SEQ ID NO: 73 - DNA, 775 bp, Homo sapiens
  SITE (124): n equals a,t,g, or c
  SITE (667): n equals a,t,g, or c
ggcacgaggccgctatagctgccggcggtgtgcgactgagtcggtggcgaagacgggaacgcgacgatggcggagactctgcccgggtcgggcgactcgggccctggcacggcttctctcggcnccgggcgttgcggagactgggacgaggcggctcagcgagctgcgggtgatcgatctgcgggcggactgaagaagcggaacctggacacgggcggcaacaagagcgtcctgatggagcggctcaagaaggcggttaaagaagaggggcaagatcctgatgaaattggcatcgagttagaagccaccagcaagaagtcagccaagagatgtgttaaaggactgaagatggaggaggaaggcacagaagataatggcctggaagacgattccagagacgggcaggaggacatggaagcaagtctggagaacctgcagaatatgggcatgatggacatgagtgtgctagacgaaactgaagtkgcgaatagcagtgctccagattttggggaggatkgcacggacggccttctcgattccttttgtgatagtaaagaatacgtggctgcacagctgagacagctcccggcttcagcccccagagcatgctgttggatggggaagatttaagaacactttgggaacttcatcgttgaacttcaaagtnactccggacattggaagaatcccttttgggagccagaaaatgagaaatactcgacattttgggggaacttgtaaactgagccagttaaagaagaaagttccgagctgg

SEQ ID NO: 74 - DNA, 386 bp, Homo sapiens
  SITE (373): n equals a,t,g, or c
  SITE (386): n equals a,t,g, or c
ctcgtgccgaattcggcacgaggaagcctcttcaggcgctgcgggtgaccgacctgaaggccgcactggagcagcgaggcctagccaagagcgggcagaagagtgccctggtcaagcggctcaaaggggctctaatgctagaaaatttacagaaacactcaacaccccatgctgcattccagccaaattcccagattggtgaggaaatgagccagaacagtttcataaaacagtatctggaaaagcagcaggagctacttaggcagcgtctggaacgttgaagctycgagaagctgcagaacttgaaggtaagccagattgtcacttttaacaaggagtccgtcatccttatcccttgtcaccaattaaatangcctgtctaatan

SEQ ID NO: 75 - DNA, 555 bp, Homo sapiens
  SITE (18): n equals a,t,g, or c
aaaggcgcctgccattgnacggtgctgacccaacatttaggtttatcgktgcgcgattgcatggcctttggtgatgcgatgaacgatcgcgaaatgttagtcagcgtcggtagcggatttattatgggcaatgcgatgccgcaactgcgcgcggagctcccgcatttaccggtgattggacattgccgaaatcaggctgtctctcactatttgacgcactggctggactatccacatctaccttattcccccgaataacgagatcccttccagcaccgggcaattgcccggttttttttgcgttgaatttgtcattttgtgccgtggtgtttaaaccgcacagaataaattgtcgtgatttcacctttaaaataaaattaaaagagaaaaaaattctctgtggaarggctatgttagataaaattgaccstaagctgctggccttactgcagcaggattgcaccctytctttgcaggcactggctgaagccgttaatctgacaaccmccccttgctggaagcgcctgaaacggctggaggacgacggtatcctta

SEQ ID NO: 76 - DNA, 759 bp, Homo sapiens
  SITE (28): n equals a,t,g, or c
  SITE (30): n equals a,t,g, or c
  SITE (663): n equals a,t,g, or c
  SITE (690): n equals a,t,g, or c
  SITE (700): n equals a,t,g, or c
  SITE (711): n equals a,t,g, or c
ggctgcggtaggccagcggtgggctggngnttgcgctcctcagatyggcggcctttcgggcggtggcttgcgtttgagcctcagaaagcgaggagcggcctccacggaagccaagctggccgagtgcttttaggaagaagatccttttattgcttttgtacaagaccagacaggatctcatttgttaaacgtggtaccaattgggtgtcttaacacaggagcagaacttcctagagcagaatgatgatggtagatctgaaagtggctgcgtacttggaccctcagatcagggctttgtgggagaccaaggggcctgcaaragagagctccggtcagagtaaaaaatctcctcaaatggactgtctcgatcctaaragctcttgctggcacttccggaatttcacctatgatgaagcaggtggaccccgtgaggctgtcagcaaacttcaagaatwatgtcatctatggctgaagccagagatccactcaaaagagcagatactggaactgctggtgctggarcarttcctgactattctgcccagggagacacagacccagatgcagaagcaccatccacagagcattgaggaggctgtggctctggtagaacacttgcagaaggaatctggtcaaacatggaatggggttgagaagaaagantcctgacatgtaccagtgaataaggtnccaggtgganatagtagagantgttggcagttagtttaggaattaggatggattaggaaggtccattgt

SEQ ID NO: 77 - DNA, 565 bp, Homo sapiens
  SITE (507): n equals a,t,g, or c
  SITE (528): n equals a,t,g, or c
  SITE (534): n equals a,t,g, or c
  SITE (561): n equals a,t,g, or c
ctaggaagtagcagaggccccttcctgtagggagttgccatggagacgcggtggggcaccgacggagttctaatgacggccgtgattggtgcaggatcctgctaatctcaggaaggcccgtagagaagggcagacactggcctcagatacctgayctggtaccctctatgargcctgcggtgctgggctccccagaccgagcacccccagaagatgaggggcctgtcatggtgaagctagaggactctgaggaggagggtgaggctgccttatgggacccaggccctgaagctgcacgcctgcgtttccggtgcttccgctatgaggaggccacagggcccaagaggcctggcccaagctccgagagctgtgtcgccagtggytgcgtccagaggtacgctccaaggagcagatgctggagctgttggtgcwsascagtctgggcgcactgcccctgagattcaggcccgtgtgcaggggcagcggcaggcagcccgaggaaggctnttgcctagtagatgggctgcncggganccgggcggaccccgaagaatgggtcanagtc

SEQ ID NO: 78 - DNA, 665 bp, Homo sapiens
  SITE (485): n equals a,t,g, or c
  SITE (505): n equals a,t,g, or c
  SITE (543): n equals a,t,g, or c
  SITE (587): n equals a,t,g, or c
acgtgtgagccctcggcgttgctgacgcccccaatgtcgtcgagcagccgggggccgggggccggagcgcgccgacgccgaacccgctgccgccgctgccgggcctgtgtgcgaactgagtgcggggattgccacttctgccgagacatgaagaagttcggggggcccgggcgcatgaagcagtcgtgcctgctscggcagtgcactgcccccgtgctcccacacacagctgtgtgcctcttgtgtggggaggctgggaaggaggacacggtggagggagaggaagagaaatttggtttgagcctcatggagtgtacaatctgcaacgagatcgtycaccccggytgcctgaaratggkgaaggctgaggktgtcatcaatgcagagatccccaactgctgggagtgccctcgctgcacccaggaaggccgcaccagcaaggattcaggtgaggggcctggccgccgtaggccgacaacggcgangagggcgccacttggggaanggatggaagctgacagaggagccaccgcttccaccgancccgcccaggcgcaagggcccctgctgccgggccccccccggangactgcttgggccccccaaacgaaaagaaaaggaagcaaggaatgagcctcccacccccaaaaaaaaaaaaaaaaaaa

SEQ ID NO: 79 - DNA, 1142 bp, Homo sapiens
  SITE (1001): n equals a,t,g, or c
  SITE (1113): n equals a,t,g, or c
  SITE (1119): n equals a,t,g, or c
  SITE (1132): n equals a,t,g, or c
ttttgcttgataataactataattactacaaggactgcctgagatgaaaaagacaggtgaaatcgaactttcacatggactggtgtctgagctggagagtctgtttgagtttgagtaggggaaagcctgaaaccccccaccacctgctcccgttagtccctgcattaactaggggcggactgggacctgatcctccaagctggaggcttgaaaactcaagggcaggcgcctggtccagcgattcggaaaccgagatgcaaagtcctcccgcgctcctagagaggacccggaagcgcggcgcggtcccggaagacgaggtggtgacacgcttccggcctttgtgactcattgtgtctgtgtcgaggcgtykggagggcctaagtccgtgtgcggtgcccttcggccggcctgagccccagagtcagctcccctttctcgcccagcgcccccaggccgctcccggggctcacggaatagtaaagaaacacatcataaaacctcccaggacataaaggtgagcacagaccctgtttggatcaagtcagttcctggagcctgaatgatgactgctgaatcacgggaagccacgggtctgtccccacaggctgcacaggagaaggatggtatcgtaatagtgaaggtggaagaggaagatgaggaagaccacatgtgggggcaggattccaccctacaggacacgcctcctccagacccagagatattccgccaacgcttcaggcgcttctgttaccagaacacttttgggccccgagaggctctcagtcggctgaaggaactttgtcatcagtggctgcggccagaaataaacaccaaggaacagatcctggagcttctggtgctagagcagtttctttccatcctgcccaaggagctycaggtctggctgcaggaataccgccccgatagtggagaggaggccgtgacccttctagaagacttggagcttgatttatcaggacaacaggtcccaggtcaagttnatggacctgagatgctcgcaagggggatggtgcctctggatccagttcagggagtccttgagctttgacctttcattcacggaggccacccagttcccattttcaaacattngttttngggaaaccccgcntttttacagt

SEQ ID NO: 80 - DNA, 486 bp, Homo sapiens
  SITE (37): n equals a,t,g, or c
  SITE (315): n equals a,t,g, or c
  SITE (471): n equals a,t,g, or c
  SITE (484): n equals a,t,g, or c
ccctggggtgagggctgtaagtggcgcgattcgcggncaggccccgatggaacctcctggtcctgtgagctgcaagatagaaagcaacatatgcccccaggtggcctccctcaccctggcaatggaaacgaacagccgagcttcaccggacaagactagaaatcgttcctccacccacccagagacaaagcatatttgacttcttcctctactggggcccttgcaagattccagctggtatgagccttctgcagagctagtgcagactaggrtggctgtatcactaacagcagctgaaactctggcccttcaggntacacagggacaagagaagatgatgatgatgggaccaaaggaagaggaacagtcttgtgagtatgagaccaggctacctgggaaccactctaccagtcaagagatcttccgccaacgcttcaggcatctccgctaccaggagactcctggttcccnggaaggccttgancc

SEQ ID NO: 81 - DNA, 778 bp, Homo sapiens
gtggcttgcagctcggggtgggtggctcatttcctggccgctcctgggcttcgcggaaagaagagattactcacactccttctcaagcacagaaccagttgtactgagctttttgctaagctgtttcagccaagaatggctgtggaatctggagtgatttcaaccctgatacctcaggatcctccggaacaagaactaatactagtgaaagtagaagataacttttcctgggatgagaaatttaagcagaatgggagtactcaatcctgccaagaattgtttcgtcagcaattcagaaaattttgctaccaggagacacctgggccccgggaggctctgagccgactycaggaactttgctatcagtgggctaatgccagagttgcacacaaaggagcagatcttagaactgctggtactggagcagttcctgagcattctgcctgaggagctgcagatctgggttcagcaacataatccagaaagcggcgaggaagctgtgaccctgttggaggatttagagagggagtttgatgacccagggcagcaggtcccagctagtccacagggaccagcagtgccatggaaggatttaacatgtctcagagcatcccaagagtcaacagacatccacctccagcccttaaagacacagctgaaatcctggaaaccatgcctttcccctaaaagtggtgaggaatgggaaatcatctggaaactcttgacacttaggcctctgtttttgagaatgcagaattaattgcacttgacaaacttg

SEQ ID NO: 82 - DNA, 810 bp, Homo sapiens
  SITE (772): n equals a,t,g, or c
ggacgcagagaagccagagactttcgcttccggctgccgcaggcgcttcgctggtgcagacgcatgctgagcacacagctaccggacaaagagtgacgcccggagctggagttatggcggctacggagccgatcttggcggccactgggagtcccgcggcggtgccaccggagaaactggaaggagccggttcgagctcagcccctgagcgtaactgtgtgggctcctcgctgccagaggcctcaccgcctgcccctgagccttccagtcccaacgccgcggtccctgaagccatccctacgccccgagctgcggcctccgcggccctggagctgcctctcgggcccgcacccgtgagcgtagcgcctcaggccgaagctgaagcgcgctccacaccaggccccgccggctctagactcggtcccgagacgttccgccagcgtttccggcagttccgctaccaggatgcggcgggtccccgggaggctttccggcagctgcgggagctgtcccgccagtggctgcggcctgacatccgcaccaaggagcagatcgtggagatgctggtgcaagagcagctgctcgccatcctgcccgaggcggctcgggcccggcggatccgccgccgcacggatgtgcgcatcactggctgagcggtggagctgcgggcggccagggccgggcgctctgtgcggactggggccatgatcgggcccgggggcctgagcctgggaccccaccccgtgttaatgaaaaatgagttttggcagcnaaaaaaaaaaaaaaaaaaaaaaaaaaaaaaaaaaaaaa

SEQ ID NO: 83 - DNA, 3313 bp, Homo sapiens
  SITE (3166): n equals a,t,g, or c
  SITE (3171): n equals a,t,g, or c
  SITE (3264): n equals a,t,g, or c
  SITE (3308): n equals a,t,g, or c
  SITE (3309): n equals a,t,g, or c
gccattatccagcagcctgggccttacttctcacacccagccatccgctatcaccctcaggagacgctgaaagaatttgtccaacttgtctgccctgatgctggtcagcaggctggacaggtggggttcctcaatcccaatgggagcagccaaggcaaggtgcacaacccattccttcccaccccaatgttgccaccgccaccgccaccaccgatggccaggcctgtgcctctgccggtgccagacacaaagcctccaaccacgtcaacagaaggaggtgcagcctcccccacgtcaccaacctactcgacacccagcacctcccccgcaaaccgattcgtcagtgttggaccacgggatccaagctttgtaaatatccctcaacagacacagtcctggtacctgggataaaagttgcagcgtcccaccatccaccagacagaccacctgaccccttctcaactctgtaacatggacgcaacctcaacccagcgcagttacaacttcactatcagcggaaggggagaaaaaccgattcaaatcaacttgtacatggaaacagcaagcattatggtcaaacagcaaaggccataaccttttgggattttttttttttttaaaatactttagggactgttgtaatttctcatatggtgctggaaatggttgggctttgtaacatttgaagtgtttccatggtagcgtgagcattaggtgacgtggctagcggaggactacccttgctcactgacttcctgttgtaacacactttccttacggagcctggctgtttcacagtatttcatgaatttacccacacaggtgtgatcctccttgagcattgaggaggcacatggagaactaaatcttttgtagtagctgagatctgcaatatataacgggacagtcaaagggcaatgtttttctgtaacatattggaaaaagaaaatgcagttatattccttttttatttgttcctttagtttgttttggttcagcagtcagcagttaagtatataacatggcccgcaaggacaatgaatccactcacattgcagaacaattccgaaaatggcaaactactactactactgttcagttttttaaaagttttgaaatgctgcacttacatttaaaaaaacaacaacaacattttttcaacaatttcaacaatgacacaaaaattcacatggaaatggggaagatggtctgttttgacagaaactgacaggaatcaatcaaaacaatcgaattttgaattgagtaaagtgcaatttcattggatagctaaatatctttgtaagatagagattgttgaaaattctatttttgtttttctagtcctttcaccccaggactctaaattattggggtaaaaaacagccttgcaagaaaaaggggagctatttttgctttttatgttttttattgttaaacttgtatccctttaaaaactgaaggaaattaaaaaaaaaaaaacaaaaaaacaaatctaatggtgcttttaccacaatatgttaactacattaaatgctaattaattattttctgttatcaaagcacatgactaaaatgaaatcatggtatctgttaattttataagctagaagtcactataatggattacgccaattctaaaaaattttacacctatctggcatcataggatttatcagttatcagacacctcattgtaccagagattgtccagaagttttaaagacctttgcatccctgaactgggctatgggaaataataatagtaataataataataataataatgatgaaaccaatactgacacaaatgctggtgcccattcagatcaagggtacttgttagggaaaaaaaaaaaagtttgcacccccaaacgtcctgtatcttatgaaaaaaaaaacaaaaaacaaaaacaaaaaaaaaacacaaaaaaccacagaaacaaaaacaaaaaaaagtgcaagtgatttttctaccagacagcgaagcacccctttgcttcccatgcgacttcaagaaggtttcctatactatacatatatatacgttctggttggcaagccctgctgatcagagaaagtctctgcatgttctagtgttagtaactaatttttatatagttaatgtaggataaagtagagtgcattaagacacaatattgtaatccctactctaggcacttgcctttaaactatgtttttcagcccttcagaagggttctactactgtcctatacaatcaagtaactgaaattcttgggaagacactttgctcctcatctttctccccgaaacaatgttgttttgttttgttttttttccttaatttgcacgaaaacaaaaattccatatcaatgtgccttgccctggatagcgattatttgtggaattgttgcacatgctcctctattgaaaggggtttttccctagtcaagcatttggagacactttttgtaaatgtgacttttatgtcagccatcgtcagtttcaacatctagaactaaatagaaagctagttgttccgcagataggagtagtctttattgtcctgtacggtcggtggcagtgctattctgagatctgtagatgcttagaatatcagtattttggatgttgctgcattttacaatttatttggagtcttcctttattttcccccagatatatgaaaatatgcaatacctgcttatatcatgtagaaaagcttagcaattattaatttttcttttatttttttttatttgaccaaagtcggtgctgcacttgacgcagtgtgttttaggtgtttgtctttgtacttttttgtgatttttgaatgcacgtgcgcaggaagggctcctcttagagaagcagtcaaactgtgaagcactaagctgaccctgcttcaagcaattttgtttttacaactgttcctttcacaagcaagccttaaaaaaaaaaaagacaacttcctttttcttcagctcccacaccccatttttcttagcagactgcagtcaatccacattcaataaaaagtatataatgcccatttttatatgcacgtttttaaacttccaagttctgaaaattgtttactggttatctctatttaaggaaaaaaaaataaaataaaacattttggattttcaaaaaaaaaaaaaaaaaaaaaaaaaaaaagggcggccgntctanaggatccaagcttacgtacgcgtgcatgcgacgtcatagctcttctatagtgtcacctaaattcaattcactggccgtcgttttacaacgtcntgactgggaaaaccctggcgttacccaacttaatcgccttgcannacat

SEQ ID NO: 84 - DNA, 735 bp, Homo sapiens
  SITE (326): n equals a,t,g, or c
gggaaatggtggctgtttagatacagtatcagtagtttgctttgtggcttcaagtttataatctttcaaaatagaatcgtgtatccattgagcaatttcaaaagctccatagttgaccccatggcttctcgggtagggcatgtgaatttgttctttctgaaaatgtgtccccttcctctgtgtagcactcaatctcattccctttttagtgtcctggtgaagacctagttcttgccggagacaattccactgcagaagcactttacttaaaaggacttgccaggctggacaatgcccgttgacttggggcaggccctaggctgtgnccatcgctggcgaaggcgagggactcccagttctcagaatcagatgctgcccttcaagaggaactctccagccctgagaccgcacgccagcttttcaggcagttccgttaccaggtgatgtctgggcctcatgagaccttgaagcaacttcggaagctctgtttccagtggctacagccagaggttcacaccaaagagcagatcctagagatcctcatgttggagcagtttctgaccatcctgcctggggagatccagatgtgggtgcggaaacagtgtccaggaagtggagaagaggcagtgacccttgtggaaagcttgaagggggaccccagagactrtggcaatggatcagtatccaggttctaggacaggacatcttatcagagaagatggaatctccaagctg

SEQ ID NO: 85 - DNA, 848 bp, Homo sapiens
  SITE (67): n equals a,t,g, or c
  SITE (675): n equals a,t,g, or c
  SITE (824): n equals a,t,g, or c
ccccacgggcttgagccggggtgaatctggaggggccgggccgagcccgggggcgctttcgcacgcnaacaaccgctagagcaggacctggtctcccgagagcgggactacttgttgatatttgaggagggaagtgtcttacctgagagcctggctggagaagactgaggtccaaggcttgaagcctaagtgattgccccaggactgtggatgatggctgcagacatcccgagagtgaccactccgctgagctccttggtccargtgcctcaagaggaagatagacaggaggaggaggtcaccaccatgatcctggaggatgactcctgggtgcaagaagctgtgctgcaggaggatggccctgagtctgagccctttccccagagtgctggcaagggcggcccccaggaggaggtgaccaggggaccacagggtgcactcggccgcctccgagagctctgccggcgctggctgagaccagaggtacacaccaaggagcagatgttaaccatgctgccaaaggaaattcargcttggctgcaagagcatcggcctgaaagcagtgaggaggcagcggccctggtggaagacttgacccagacccttcaggacagtgctgtagctgtctttgcttcccttccggtggaggtgaccagtttgtaatgaacttctggntctccagtcagatactatggaggagagagtgatggagggctgaggagtaggcctcaggttgttatttggttggggaggcacagagcagaggttcaggtctcagcaggtgtcagaggtgattacagcccttcccatccaccttgcagcangggctttgtgcctttcatctttaa

SEQ ID NO: 86 - DNA, 978 bp, Homo sapiens
  SITE (165): n equals a,t,g, or c
  SITE (926): n equals a,t,g, or c
  SITE (947): n equals a,t,g, or c
  SITE (969): n equals a,t,g, or c
  SITE (975): n equals a,t,g, or c
ggccatcttccgttgcaaagcatttctgggagctgcatgtgggtgacgcagcagcattgttcgcaggcacaggaagccgcggctgagctgaagggctcgagaaggagcccagagcgctgcacgctgctccctctgggtagtctgaagggtcagagctggackgcnswgccctatgtgctctgggagattccagaatattcaagtaaatccggattttcccagaggcagaatatctaactccttcaggagaacttccagtacagaaaacaaaacaaagacgctggggaaacttcaccaagagcctcggcagctccagagcgacgggaaacgaaagattttgctggaggagcttgccaacagcgatcccaagttagccctcactggagttcctatagtacagtggccaaaaagggataagcttaaattccccactcggccaaaggtgcgggttcctaccatccccattacgaagcctcacactatgaaaccagctccacggttaacacctgtgaggccagctgctgcctccccgattgtgtcaggagccagacggagacgagtgcgatgtcgaaaatgcaaagcctgtgtgcaaggagagtgtggtgtttgccactactgcagagacatgaagaagtttggggggcctggacgcatgaagcagtcctgtgtcctccgacagtgcttggcacccagactgcctcactcagtcacatgttccctctgtggagaggtggatcagaatgaagagacacaagactttgagaagaaactcatggaatgctgtatctgcaatgagattgttcatcctggctgcctycagatggacggagaggggttgcttaacgaagaattgccaaattgctgggaatgtccaaagtgctaccaggaggacagctcggagaaagsccagaagcggaaaatggaanaaagtgaccaaaaaaacttgngcaaggccaaagtccttgcggnccttgngga

SEQ ID NO: 87 - DNA, 756 bp, Homo sapiens
  SITE (651): n equals a,t,g, or c
  SITE (719): n equals a,t,g, or c
  SITE (753): n equals a,t,g, or c
actatagaaggtacgcctgcaggtaccggtccggaattcccgggtcgacccacgcgtccgcgccgctccagccatgtcagcgcgcgcgagcctgggcccaccatgagccatggccatgtccgtgagcgccgaggacgacgactatgaatcggagccggaccagaaccgggctgtgggtcggcccaaggggaagctgggcccggcctccgcggtgaagttggccgccaaccggacaacggcaggagctcggcggcgccggacgcgatgccgcaagtgcgaggcctgcctgcggaccgagtgcggagagtgccacttctgcaaggacatgaagaagttcgggggccccgggcgcatgaagcagagctgcatcatgcggcagtgcatcgcgccagtgctgccccacaccgccgtgtgccttgtgtgtkgcgargcggggaargaagacacggtggaagargaggaargcaagtttaacctcatgctcatggagtkctccatctgcaatgaaatcatccaccctggatgccttaagattaaggagtcagagggtgtggtcaacgacgagcttccaaactgctgggagtgtccgaagtgtaaccacgccggcaagaccgggaaacaaaagcgtggccctggctttaagtacgcctncaacctgccggctccctgctcaaggagcagaagatgaaccgggacaacaaggaagggcaggaacctgncaagcggaggagtgagtgtgaggaggcgcccggngca

SEQ ID NO: 88 - DNA, 608 bp, Homo sapiens
tgaaggaagaacgtgagtaggccagatcagaaaagggagctcaggtaccttccagagagtgagacccagcgcccttgtctcgcacccagtaggctttcatccccgccatggcggagctgatccagaagaagctacagggagaagtggagaaatatcaacagctacagaaggacttaagtaaatccatgtcggggaggcagaaacttgaagcacaactaacagaaaataatatcgtgaaagaggaactggccctgctggatgggtccaacgtggtctttaaacttctgggtccggtgctagtcaaacaggagctgggggaggctcgggccacagtagggaagaggctggactatatcacagctgaaattaagcgatacgaatcccagcttcgggatcttgagcggcagtcagagcaacagagggagacccttgctcagctgcagcaggagttccagcgggcccaggcagcaaaggcaggggctcctggcaaggcctgaccccatggtggggggaggggargggaggggagggaatgaggcagctctaggatctatactgtagctaataaaatgtaaaaacacctgaaaaaaaaaaaaaaaaaaaaaatt

SEQ ID NO: 89 - DNA, 2300 bp, Homo sapiens
gggctaagcgtcctgagccaccctcgacatccactttgaaacaagttactaaagtggattgtcctgtttgcggggttaacattccagaaagtcacattaataagcatttagacagctgtttatcacgcgaagagaagaaggaaagcctcagaagttctgttcacaaaaggaagccgctgcccaaaactgtatataatttgctctctgatcgtgatttaaagaaaaagctaaaagagcatggattatctattcaaggaaataaacaacagctcattaaaaggcaccaagaatttgtacacatgtacaatgcccaatgcgatgctttgcatcctaaatcagctgctgaaatagttcragaaatcgaaaatatagagaagactaggatgcgtcttgaagctagtaaactcaatgaaagtgtaatggtttttacaaaggaccaaacagaaaaggaaatagatgaaatccacagtaaatatcgacaggaagataatatgacctcagtaacaaaccacttttctcaatcaaagctggactccccagaggaattggaacctgacagagaagaggattcttctagctgtattgatattcaagaagttctttcttcatcagaatcagattcatgcaatagttccagttcagacatcataagagatcttttagaagaagaggaagcctgggaagcatcacataaaaacgatcttcaagacacagaaataagtccaagacagaatcgccgcacaagagccgctgaaagtgctgagattgaaccaagaaacaagcgtaataggaattaatgtgggcttttgctgacttttcaaatgcattgattagaataccgtacttttggttgccacagatagrttttctatttataaatgcccaaggaaagatgctaaattctaaatattacggttagctgatattcattcttttctgcttttccagaggggaaaaatgttacaaaatatccttacttggtcagttgcctcctgcctctaaaacatctctctctaraaatactgacatttcacacaggtaccagctttgcagaggaggtagactctttggcactttggcacagggatttggtttggtttggtttggtttgataattaaatttcagaatgtccttaggccattctccttctcttccatggagaatccagcctcacaaaaggattctttcaacttctttattgcaagaaacagttgagttaaatgtttgtttttggaaaggcgggatgtcagttcacatccttggtgtgtgtaagtaccgatgcacgccaccaccatgcctgtgttacagcagctccatgatggttgttgcccgaggttaatgtagttgtttgttagacctgtgtcttacacatttctcagagtaggatattagtattataatttaaagctacgacagtcacaaagtcacaataacttagaaacattgcgcatattcttctgaaatagcacttaaaaatgattagtgtcagtattttttcacttgggtcaatcaaatctgtaacactgaatccaagctattaaacaaaaagtatgcaatgaatgaattttgtaaatgaatagagagtatcagtttacaataatgttcttaaaacagtatcctctggatagttgagtatgggttagaaatcattgaaatggattggtcagaaattgctatctgtgtaaaatgtctaccagtagccagatgcttccagagttcttaatgcctctctggcatttcagagccagcatcccccaactcccacccctctgccatcacccagcccaaacacatcagctttcaaatgagatgatagtaaatgcggcaatgttaagacaagaaatttatgatttgccagattcaacatttatgacctccccttccaaagactgtctccgttgaccttgtctttttggtatgccttggggtttctgataatgtgtggagtctcattatggctgagagtttagtgttttcacagtgaagtgcagacatttgatttctttatgagttccctgtgttagaaatggctatagaaaaatttgtcataataatttcatttgcatgaaatcctgaggggtgcattaaggaaactaaaagcaccacttaccaaatctatcggcagaactgatgtgaggtaagtgagcatgtcaaacaaaataggagctcacatggatatatttatgtcactgagttgtcagaaattatgtcaaaatgaaaactgtttgtttcatgacaaattatatagtctataaattaaactggaagtaattattaaaaaaaaaaaaaaaaaaaaaaa

SEQ ID NO: 90 - DNA, 1154 bp, Homo sapiens
  SITE (1149): n equals a,t,g, or c
cgagcggccgcccgggcaggtactttttttttttttttttttttttttttaagcatctggcttttattggttgcctttcttaaacccagcattttttaaaaagtcacctgaggtggtagtttagtcagggctggagaaaggggtaggccagtggtcagtcgggaggagggtacgcggggagtggagtgaggggtaacaagatggcgaccgagacggtggagctccataagctaaagcttgccgaactaaagcaagaatgtcttgctcgtggtttggagaccaagggaataaagcaagatcttatccacagactccaggcatatcttgaagaacatgctgaagaggaggcaaatgaagaagatgtactgggagatgaaacagaggaagaagaaacaaagcccattgagctccctgtcaaagaggaagaaccccctgaaaaaactgttgatgtggcagcagagaagaaagtggtgaaaattacatctgaaataccacagactgagagaatgcagaagagggctgaacgattcaatgtacctgtgagcttggagagtaagaaagctgctcgggcagctaggtttgggatttcttcagttccaacaaaaggtctgtcatctgataacaaacctatggttaacttggataagctgaaggaaagagctcaaagatttggtttgaatgtctcttcaatctccagaaagtctgaagatgatgagaaactgaaaaagaggaaggagcgatttgggattgtcacaagttcagctggaactggaaccacagaggatacagaggcaaagaagaggaaaagagcagagcgctttgggattgcctgatgaaaagttcctgatactttctgttctccagtgttttccatttctctccttcttcttggtcacatatatgcctaaatgcacagtcatgtgcctacgtcctgcctcgcaatgagggagcatgtaccccaggtacatccatgaactgcggcagcagtttgacttattgctgtttcagctttaaggttgttgtgtttttgtttttgattatgttgcttgttaataaaaaaaaatagaaaagaraaaaaaaaaaaaaaaaaaaaaaaaaaaaaaaaaaaaaaaaaaaaaaaagaaaaaaaaaaaaaaaaaaaaaaaaaanggggg

SEQ ID NO: 91 - DNA, 752 bp, Homo sapiens
  SITE (750): n equals a,t,g, or c
ggacgcatcgagtacctggtgaaatggaaggggtgggcgatcaagtacagcacttgggagcccgaggagaacatcctggactcgcggctcattgcagccttcgaacaaaaggagagggagcgtgagctgtatgggcccaagaagaggggacccaaacccaaaactttcctcctgaaggcgcgggcccaggccgaggccctccgcatcagtgatgtgcatttctctgtcaagccgagcgccagtgcctcctcgcccaagctgcactccagcgcagcgtgcaccggctcaagaaggacatccgccgctgcaccgtatgtcccgccgtcccctgccccgccggcccgcaggggggcagccccggactgsgcccgccatttcgcccttctcggagacggtgcgcatcatcaaccgcaaggtgaagccgcgggagcccaagcggaaccgcatcatcctgaacctgaaggtgatcgacaagggcgctggcggcgggggcgcgggcagggggccggggcgctggcccgcccmaaagtcccctcgcggaaccggtttataggcaagagcaagaagttcagcgagacttcctgcgtacacagatccgccacatgaattcggcgctttgcgtgtacaagcctccgaccgrgmccctggtagccccgtcccccggcaaggctgaggcttcagcccgggccytggctatttttggccgcccccgccgcccccttacgacgcccgcagtctggttcttccggntg

SEQ ID NO: 92 - DNA, 891 bp, Homo sapiens
  SITE (757): n equals a,t,g, or c
  SITE (795): n equals a,t,g, or c
  SITE (860): n equals a,t,g, or c
  SITE (891): n equals a,t,g, or c
gacgcaggacccaactgaaacaaagtgtcggccgcccggcgccggcgcccgccccgaccctgcccctcccgcccgcaactccgccgcccaccatggcttccgaggagctgtacgaggttgaaaggattgttgacaaaaggaaaaataaaaaagggaagacagagtatttggttcggtggaaaggctatgacagcgaggacgacacttgggagccggaacagcacctcgtgaactgtgaggaatacatccacgacttcaacagacgccacacggagaagcagaaggagagcacattgaccagaacaaacaggacctctcccaacaatgctaggaaacaaatctccagatccaccaacagcaacttttctaagacctctcctaaggcactcgtgattgggaaagaccacgaatccaaaaacagccagctgtttgctgccagccagaagttcaggaagaacacagctccatctctctycagccggaagaacatggacctagcgaagtcaggtatcaagatcctcgtgcctaaaagccccgttaagagcaggaccgcagtggacggctttcagagcgagagccctgagaaactggaccccgtcgagcagggtcaggaggacacagtggcacccgaagtggcagcggaaaagccggtcggagctttattgggccccggtgccgagagggccaggatggggagcaggcccaggatacacccactagtgcctcaggtgcccggccctgtgactgcagccatggncacaggcttagctgttaacgggaaaggtacatctccgntcatggatgcattaacagccaatgggacaaccaacatcagacatctggtacaggagtgactgcancaaaaggaaatttattgccaccgaagagacn

SEQ ID NO: 93 - DNA, 1208 bp, Homo sapiens
  SITE (530): n equals a,t,g, or c
gcaggaatgacaccaaggaagatgtctttgttcaccagacagctattaaaagaaacaaccccaggaagtttctgcgcagcgttggagatggggagactgtggaatttgatgtcgtggaaggagagaagggcgcagaagccactaatgtaactgggcctgggggagtacccgtgaagggcagccgttatgcccccaaccgacgtaagtcccgccgattcatcccccggcctccctcagttgccccaccacccatggtggcagagatcccctcggcggggacaggacctggcagtaaaggggagcgggctgaagactctgggcaacggccccgacgatggtgccccccacccttcttctaccgacggcggtttgtgcgaggcccccggcctyccaaccagcagcagcctatagagggcactgacagggtagaacccaaagagacagccccattggaggggcaccaacagcagggagatgagcgagtccccccgcccagattccggcccaggtaccgaaggcctttccgcccnaggccacgccagcagcctaccacagaaggtggggatggtgagaccaagcccagccaaggtcccgctgatggttcccggcctgagccccagcgcccacgaaaccgcccctacttccagcggagacggcagcaggcccctggcccccagcaggcccctggcccccggcagcccgcagcccctgagacctcagcccctgtcaacagtggggaccccaccaccaccatcctggagtgattccaactcaactcaaaggacacccagagctgccatctggtatctgccagtttttccaaatgacctgtaccctacccagtaccctgctccccctttcccataattcatgacatcaaaacaccagcttttcaccttttccttgagactcaggaggaccaaagcagcagccttttgctttttcttttttcttccctccccttatcaagggttgaaggaagggagccatccttactgttcagagacagcaactccctcccgtaactcaggctgagaaggaaccagccagctcttacctcctcctggttgcttttcttgcccccaccccaagtttatttttgttttcccccggccccctacctctgaagccattttatgatctgtcatgtgccacctgagcctccagtaaaaacaaaaacaggctttcctgtgaaaaaaaaaaaaaaa

SEQ ID NO: 94 - DNA, 551 bp, Homo sapiens
gctgcagcgacgtcgggagcagaagcagcggcgacacgacgcgcagcagctgcagcagctcaagcacctggagtccttttacgaaaaacctcctcctgggcttatcaaggaagatgagactaagccagaagattgcataccagatgtaccaggcaatgaacacgccagggaatttytggctcatgcaccaactaaaggactttggatgccactggggaaagaagtcaaagttatgcagtgttggcgttgcaaacctatggtcaccgaacgggtgacaaagaatgccctttctttatcaaaggcaaccaaaagttagagcagttcagagtggcacatgaagatcccatgtatgacatcatacgagacaataaacgacatgaaaaggacgtaaggatacagcagttaaaacagttactggaggattctacctcagatgaagataggagcagctccagttcctctgaaggtaaagagaaacacaagcaaaaaaaaaaaaaaaaaaaaaaaaaaaaaaaaaaaaaaaaaaaaaaaaaaaaaaaaaaaaggggggg

SEQ ID NO: 95 - DNA, 297 bp, Homo sapiens
  SITE (15): n equals a,t,g, or c
acccagctcggatcnactagtaacggccgccaktgtgctggaatttcgagcggccgcccgggcaggtagatgaaatagtgatgtagcaaaaacctagtaaattctgaatgcttttccacgtagacttatctggaatgtgaacacaactctttggttaatagtaaatgcttaactgtagtcctgagtaggtgcatttctgtctgtctcaataaattttactttgtctgcaaaaaaaaaaaaaaaaaaaaaaaaaaaaaaaaaaaaaaaaaaaaaaaaaaaaaaaaaaaaaaaaaaaaa

SEQ ID NO: 96 - DNA, 520 bp, Homo sapiens
ctatagtgagtcgtattacaattcactggccgtcgttttacaacgtcgtgactgggaaaacccagctggctttgctccgttccctggctagtctgtgcctggtcaccagggaggctgagtgaggggctgtgaacagttgccggaagcaccccctccctccccggcccgtgcagcagtgtctgagctgtagtgaaagtttcagggcctgcaaaagaagaggcttgggcacaggactgaccatggctccaggggtttaggacccccagacctgtgaaggtgggagcagctcaccaccttcacgcaggctttgtatgttctctgagccttagttgattttggcccccaaaccaaatccaaaggttctggcccaccttgtcagaggcttccaccctgctcacatgttgggaatccctggaataaaatgcttgttcagtgtgaaaaaaaaaaaaaaaaaaaaaaaaaaaaaaaaaaaaaaaaaaaaaaaaaaaaaaaaaaaaaaaaaaaaaaaaaaaaaaaaaag

SEQ ID NO: 97 - DNA, 583 bp, Homo sapiens
  SITE (558): n equals a,t,g, or c
  SITE (562): n equals a,t,g, or c
acctccccaagccatgctaggacctcacacctcgkacatacacccttcaacacctcagacacctcagggacttcccaccaggggcaccccaggcgcctcccgatggcctctccctctcaccccgacagtgacgggcagtgaggacatgtgcgtgcacttctttgatgtggagcgggcggccaaggctgctgtcaacaagctgcagggccacagtgcacctgtgcttgatgtcagcttcaactgcgacgagagcctactggcctccagtgacgccagcggcatggtcatcgtctggaggcgggagcagaagtagggtcctgtcggccctgctgctgtcctccatcccacccctcttactccagcctcgtgttgtaaataaagtttcggtggtcatgctgagggccggctcccagctctgccggggacggacagggcagagggcagcgggcagctccaggaacacggtgaaaaaaaaaaaaaaaaaaaaaaaaaaaaaaaaaaaaaaaaaaaaaaaaaaaaaaaaaaaaaaaaaaaaaaaaaaaaaaaaaaaaaaaaaangggnggccgttttaaaggatccaag

SEQ ID NO: 98 - DNA, 961 bp, Homo sapiens
  SITE (557): n equals a,t,g, or c
  SITE (593): n equals a,t,g, or c
tctaaaatatttaggtcacactatataatgtacgcctgcaggtaccggtccggattcgcggccgcgtcgacccccycccccttttttttttttttttttttttttttttttttttttttttttttttttttttttttttttttttttttttttttttttttatccaggtggttttatttartaaaattttacaaaagtcagggctgacttcttggctctgccttcgaagagcacagttttccttagcagataactgggggaagccacgggccaccagaggctctcgcaggccagtggtgcgacctcctgtccacaaccgtgaggacaaaggcctgtccttgaggctgctgggcaggggccaggcagtaagtgagggcacctgcgaggctctgaggacacagcacatctgtacaccctcatggtgccctgaccacacagcagccagggsagagtgtgacagacagagggtttctgagcggtctcaacagctgtctctctggtgacgtttcagtgccttccccttttcctctgaactcatggatttgggccacaagttngctccccctggactaagcagcccagaagccatgccnagggtcmatccctgggmaaccccccaccaggtgccagcagcattcacatggggcagggggcccatgagtgccacctggaccccgacagcctgtcatggcatccagaaacctctgtctcrcccttgctctgccaaggacacatcctccatctcctggtcagacccgagacaagcccagaacacaggacaggtcctgttggagagatcccaggaatgggcctggggtctggaaaacagctccacagacagctctggtttccacatcaacccagccaggaagaaaatgaaaaattcctcataaaggtacaaagtcctcctgattttagcaaacgtcgctattaaagagtgtcaatttgagcttgcgtggag

SEQ ID NO: 99 - DNA, 193 bp, Homo sapiens; identical to SEQ ID NO: 23
  SITE (20): n equals a,t,g, or c

SEQ ID NO: 100 - DNA, 337 bp, Homo sapiens
  SITE (304): n equals a,t,g, or c
  SITE (306): n equals a,t,g, or c
ggyattggattgctcagaataaagtgtctgttagaaaaacctttagatatataaaagattaatttgtgcacatctaaatgttttatatatctaaaggtttttctatcatgcattggattgctcagaataaagtgtctgttagacttcgttttggtaaataaattctccataatgtagattaataatataaaagtctttaatgacacaatatatctatatagcctcactgtataattcagaaataaaaattgattctgcaaaaaaaaaaaaaaaaaaaaaaaaaaaaaaaaaaaaaaaaaaaaananaaaaaaaaaaaaaaaaaaaaaaaaaaaaaaa

SEQ ID NO: 101 - DNA, 775 bp, Homo sapiens
cccgggtcgacccacgcgtccgcttttccaagtttcagtgtcacagattgcatatggcatgataatacatcacattcatttccctcaagtttgtttttttttttgacaggtagttaacaaaaaatgtgcaaattgccataattctctaaaatagtatttcttgcattcattaataatgaaaaaagcaaggatggtcagattattgtgtttgatgtttttcaacccctttttttttttttttcaatatagccggtatcgtatatggtttttgcgattttgatccttttttttttttttttttccttttgagatggaatctcgctctgtcgctcaggctggaatgcagtggcgcaatcttggctcactgcaacctctgcctccccggttcaagtgattcttctgcctcagcctggcctacatgaggaaaccctctctgctagtaatacaaaaattagccgggcatggtggggcatgcctgtaaccccaggtacttgggagggtgaggcaggagaatcgcttgatcctgggtggtggaggttgcagtgagctgagattgtgccattgcactctagcctgggcaacgagagtgaaactccatctcaaaaaggaaaaacaaaacaaacaaacaaaaaacaccaaaaaaaaaaaaaaaaaaaaaaaaaaaaaaaaaaaaaaaaaaaaaaaaaaaaaaaaaaaaaaaaaaaaaaaaaaaaaaaaaaaaaaaaaaaaaaaaaaaaaaaaggggggccgctctagaggatccctcgaggggccc

SEQ ID NO: 102 - DNA, 640 bp, Homo sapiens
  SITE (631): n equals a,t,g, or c
  SITE (635): n equals a,t,g, or c
  SITE (636): n equals a,t,g, or c
  SITE (637): n equals a,t,g, or c
  SITE (640): n equals a,t,g, or c
gcttttccaagtttcagtgtcacagattgcatatggcatgataatacatcacattcatttccctcaagtttgtttttttttttgacaggtagttaacaaaaaatgtgcaaattgccataattctctaaaatagtatttcttgcattcattaataatgaaaaaagcaaggatggtcagattattgtgtttgatgtttttcaacccctttttttttttttttcaatatagccggtatcgtatatggtttttgcgattttgatccttttttttttttttttttccttttgagatggaatctcgctctgtcgctcaggctggaatgcagtggcgcaatcttggctcactgcaacctctgcctccccggttcaagtgattcttctgcctcagcctggcctacatgaggaaaccctctctgctagtaatacaaaaattagccgggcatggtggggcatgcctgtaaccccaggtacttgggagggtgaggcaggagaatcgcttgatcctgggtggtggaggttgcagtgagctgagattgtgccattgcactctagcctgggcaacgagagtgaaactccatctcaaaaaggaaaaacaaaacaaacaaacaaaaaacaccaaaaaaaaaaaaatnaatnnnaan

SEQ ID NO: 103 - DNA, 1434 bp, Homo sapiens
ccacgcgtccgtggaattcaggtcagaggtgagtgatgtggccagtgagggcagccacacagatcggccgccgggactgcagggcgctgcccaccggcgctcattttatcaccagcagcccaggcttaacctgatccttgcttgtctgtcaagtgactgttagcggccccaggagtggaagggacatggaggagatactcatcttcagagagaaccactgggttttttcacacctctgtccacatgcgcctcctgtctcttgagctcaccacttggccttggccagtttttggtttatgccaacatgtttcctcttcacaagagacaaaaatcctgaatatttaatccaaattattctgatccctgaacccagaggtgtgggacattttatgtggacagtgaattcatgaagactccagacatctggttctgttgtttgagatagaatgtatgctaatcctctttgtttttagttattctgcttaagcaaatgtcaaccccaaatgcacttttttctcctgtgagaaaagcatttaaaacacagcataatcaggaacatttaatttccatttttaaagcgtgtggtaataaatttaatgtgtcactagtgcattagtttatgtattaagatatttgcgcaggccggcgtttctgagaaaggtgtttgaaacacaggatttctaatattaagtgttaagtgttccatcctcatgtctcaacctttgacctctgtagataatgacctcaccacatcctgcaatccttcaaagagcatctttctgtaagatttattttgtggacattcattctccagggaggcttttggactcaaactcctgagatttgagaaactcttagctgcatcctggtgtcccagggaagaccagctccctgtgagccacggtgccagttcctcaggctcttctgtcagggtctgggctttggtttgctctcccggaggccagggctgggggttagggtgaggaagtgcctggccctttgcccatctgtctgcttacctattctgcaggtctggagctgctgttagctcagggtgcttttgtgtgaattagaaaaaggggcctcatcaaccaggtgagtagggagatgcagccagcgccaggacctgtggctctgtgagcgagtagaggcagggtttagctcccacttgccttttgtggtcacttgtctagtgaaatgcacattctgggcagtggtacatgtgctcctgtctgggtgccatccccgatacctctttggggaccgctttctattggtgcttcttccttcttcaaactctccctcccatgatctggaatttcatatcttaaaaaaaaaaaaaaaaaaaaaaaaaaaaaaaaaaaaaaaaaaaaaaaaaaaaaaaaaaaaaaaaaaaaaaaaaaaaaaaaaaaaaaaaaaaaaaaaaaaaaaaaa

SEQ ID NO: 104 - DNA, 1434 bp, Homo sapiens; identical to SEQ ID NO: 103

SEQ ID NO: 105 - DNA, 621 bp, Homo sapiens
  SITE (80): n equals a,t,g, or c
  SITE (612): n equals a,t,g, or c
  SITE (620): n equals a,t,g, or c
  SITE (621): n equals a,t,g, or c
aaaccgcccctccgctgagcccacaccccaatgcaacacgtccggcccaaactccagcgccctgggaaactgaaaccccngcccactgttgcctagtcaggggcytgggttccycccacttaacactgttgaacatcctattttcctgaaagtgtgtttaaaattattcagtgcctaatcattgttttttccctttgtaaatgttgattcagaaaaggaaagcacaggctaagcagttgaaggttccccaccattcagtgagagcagaacccccattccccagcctctgctggtagcatgtcgcagtttcccatgtgtttcaggatcttcgggctgtcgttagacaggttaatgaagaacacttctcaacagtttcctttttgttttcctttataattcactaaaataaagcatctattagtgtctgatttaggaatgtaaaatgattctgtattaatgtaaataagattatctattgcaaaaagatatttcaaacctaaaaaaaaaaaaaaaaaaaaaaaaaaaaaaaaaaaaaaaaaaaaaaaaaaaaaaaaaaaaaaaaaaaaaaaaaaaaaaaaaaaaaaaaaaaaaaaaaaaaaaaaaaaaaaaaangagggggnn

SEQ ID NO: 106 - DNA, 223 bp, Homo sapiens
  SITE (7): n equals a,t,g, or c
  SITE (165): n equals a,t,g, or c
gtacggnattcccgggtcgacccacgcgtcgctactttgcatgaatttggaatggaaggccaggtttctataacttttraacaggtactttgtgaaatractcaatttctattgtggtaagctcattggcagcttagcattttgcaaaggaattgctttgcaggnaaatatttaattttcaaaaacataatgattaatgtccaattatgcatcaattccccag

SEQ ID NO: 107 - DNA, 1767 bp, Homo sapiens
  SITE (138): n equals a,t,g, or c
  SITE (1753): n equals a,t,g, or c
  SITE (1755): n equals a,t,g, or c
ccctcaagtgaagagcttaaaatgtggttcttcctccgtagaactgggactattgaatcattaccaccgtgacgttgggctcatattactttcttgttcccaaatgtccttctaagtggtttgaaaaatgtttaaacnaaaaaaaaacaacccggtagcattgtcccttccccactgacaaacttatcaaatccagaagctttagagtttcgtctctaattatttttctcctgaacaaaattacccaagtcaaaacaaaatgtatttttagaattacggcagcatacgacctgaattttgtgagtttcgtggctttatcttaaatcaccatttccctaaaaacggtttctttctccttagaaatgctggtggcaacttgatgaaacagccaaatgcaccagggcaggtcactttcccattacactgattccacaattaaaaaaaaaaaagaaaaaaaactcattgagatagctacagttctataggttaatttaaagcctcctttttctactcatttttgaaagcaaaattacattttactattttacataaccagtgaaaagacgttgaaagcctacagctcactgtttttggtgctctggaaatgttgagggtgggtttttaaccagtgatttttaacgtgcagtgaatttgttagacttttaaacaccagctaaggtagtcaaacttgatccccattaaaaatcaaggaattaggggtcgggggagggtttaggagtgatccagaatgacctcccagaattactgtgcgtacaactttatttttcagagttttcattggaatggtaagagttttatgaaagacagttttaaaacttattctgagttaaatattaatactttaaaaaattattgtactagacttatcgcagccttttgaaagtagcagagtttcatcataccacatatataacagagcataaattttctataatcaggcaccttttgctgcttttgagtaagactgttttcctgtttaagtgttaagcatcgccagacataaaaatctattctctcctctcgattgtagcatagcctgacagctctagatacagcatttctatgatgaaaaatgagtatccatcaggaaatctagaagactagccgtgttttctcagactccacctttgtttgcactctgttgcctgtgaggagctttctggcatgtgattatttacttcaaaactagagttccaagcacctacattaattattttatattgtgtgcagaatagtatatcttttaatgtcagatatgatacactgcacatattgcttttgcactcttaaaatttttgtactaaataatagaaaatatttatattctttgagtgtgagctttgaatagatggcattatcactttattgtttttttaacaaaaactttttctcaattattctattgcaatgttattctgagcaagtcctatgccaaatatcttgtataatgtttgtatggaagattaaattttactcttgtgtggtaagactatttcagttactgattttatagttggaatttgatattccagcacaaagtccacagtgtattcagaaatccaagttggtgtcatacatttcattttgatgtgaacttttctttgctttcctttgttctaagactccattttgcaataaacgttttgacagtaaaaaaaaaaaaaaaaaaaaaaaaaaaaaaaaaaaaaaaaaaaaaaaaaaaaaaaaaaaaaaaaaaaaaaaaaaaaaaaananaaaaaaaaaaaa

SEQ ID NO: 108 - DNA, 2008 bp, Homo sapiens
  SITE (2000): n equals a,t,g, or c
gctcgtgccgcttctccctcctcctcctccccccgctactatccgcggcccagagaactgccgcttgccgccattgacacgcacagatagaacccaaagaaaggcaaagagtcctgcccggcaccggcgccgcgtgggccaaacctgcgcccgtggaggggcgcgcagagggcaccgggcgccgggagcaggcggcgcagcaccagcattgtgttagtgccgggaggccactgtgtcagcaagctgagagggaaactgaagcaagatgtcgggccggagtgggaagaagaaaatgtccaagctgtcccgttcagctagggcaggtgtcatctttccagtggggaggctgatgcgttatctgaagaaagggacgttcaagtaccggatcagcgtgggcgcccctgtctacatggcggcagtcattgagtacctggcagcggaaattctagaattggccggcaatgccgcgagggacaacaagaaggcccggatagccccgagacacatcttgctggcagttgccaatgacgaggagctcaaccagctgctaaaaggagtgaccatcgccagtggaggcgtcctgcccagaattcaccccgaactgctggccaaaaagcgagggaccaaaggcaagtcggaaacgatcctctccccacccccagagaaaagaggcaggaaggccacgtcaggcaagaagggggggaagaaatccaaggctgccaaaccacggacgtccaaaaagtccaaaccaaaggacagcgataaagaaggaacttcaaattccacctctgaagatgggccaggggatggattcaccattctgtcttctaagagccttgttctgggacagaagctgtccttaacccagagtgacatcagccatattggctccatgagagtggagggcattgtccacccaaccacagccgaaattgacctcaaagaagatataggtaaagccttggaaaaggctgggggaaaagagttcttggaaacggtaaaggagcttcgcaaatcccaaggccctttggaagtcgccgaagccgccgtcagccaatccagtggactcgcagccaaatttgtcatccactgtcacatccctcagtggggctccgacaaatgtgaagaacagcttgaagagaccatcaaaaactgcctgtcagcggcggaggacaagaagctaaagtccgtcgcgttcccgcctttccccagcggcagaaactgctttcccaaacagactgcggcccaggtgaccctcaaagccatctcagcccactttgatgactcgagcgcgtcctcgctgaagaacgtgtacttcctgctcttcgacagcgagagcatcggcatctacgtgcaggagatggccaagctcgacgccaagtagccgccgcactttccagcagggatcggaggacgacccgagtcccaagagtggggttttgctttttaaaaggagagaggaggggtgatggcaggggagtggagggtggccgggcaggtcctgccggcgcagggagccctctgcccttcacactctcctccaaaagagcctccatctgtaaggaagcaggtctccgcgaggggtttctttccatgtgttttcctcctgttgttttagaacttttttaaaaaaacagacctcgttttagatttatagcattgacttttacacacattcacacaagaaaaaaatcctttcaaaattcttaaatcttctgttcctcctttttccaagggaagagggcaaaaagtggcctgggctctgttggtgtgcgtgttccgtggcggagagaagaaaatgggaaagacatctcactggtgcttttctcttttgttttagtgccccccgcccccatccctataatatctgtaactactcctaaaaaggttttgattcaggcttttttttggtttcattttgtttttttaagaaaaagaaaatgaaaggaaaaaaataaaagatccagtgtctttcttaaaaaaaaaaaaaaaaaaaaatntctcggtc

SEQ ID NO: 109 - DNA, 304 bp, Homo sapiens
  SITE (302): n equals a,t,g, or c
  SITE (303): n equals a,t,g, or c
  SITE (304): n equals a,t,g, or c
ggtgctagcatgcctggccagggtttaaaatattcaaacatgttgtgtgtacccagatatgctgttaatttaggaaaaacagtacaatttctatgaagtggttgtgactattttctgtagtcaatacagttgggatatctgatctatttctctgtctactttggaaatgattgcataataaataaaattttactgtttttttaaaaaaaaaaaaaaaaaaaaaaaaaaaaaaaaaaaaaaaaaaaaaaaaaaaaaaaaaaaaaaaaaaaaaaaaaaaaaaaaaaaaaaaaaaaaaaaggggnnn

SEQ ID NO: 110 - DNA, 233 bp, Homo sapiens
  SITE (10): n equals a,t,g, or c
  SITE (227): n equals a,t,g, or c
atgacatttnaaagtttctgtgtcttaactctttttaattaattttctgcacgttgcttttttctctttgtttttaattccatacagagtattcaattcttgaaacacattaaaataatttgcttgctaaaaaaaaaaaaaaaaaaaaaaaaaaaaaaaaaaaaaaaaaaaaaaaaaaaaaaaaaaaaaaaaaaaaaaaaaaaaaaaaaaaaaaaaaaaaaaaaaangggggg

SEQ ID NO: 111 - DNA, 476 bp, Homo sapiens
  SITE (24): n equals a,t,g, or c
  SITE (57): n equals a,t,g, or c
  SITE (80): n equals a,t,g, or c
ctcactgccaccctctgccctccngggttcaagcgattcttgtgtctcagcctcccngagtagttgggatttacaagtcnaattttttttttaactaaaactacagaatctatttttcttggtctcatactcagttttttatgtagtcacttagtaaataacctaatttgcttgttttctccacactaattttagggtgaattcctcatttcgcttttcagatcatggggtgagggggatggttgtgtgtgtgaggaactgaggaatcagatggaaaacaatgcctctgctcctttgagtataatcagtgatatttgaggttccagggttaaatgctgcatttttatttctgacgttcgtaccttaaaatatttgaagaaaataaactatttcattgttgtcaraaaaaaaaaaaaaaaaaaaaaaaaaaaaaaaaaaaaaaaaaaaaaaaaaaaaaaaaaaaaaaaaaaaaaaaa

SEQ ID NO: 112 - DNA, 246 bp, Homo sapiens
  SITE (244): n equals a,t,g, or c
  SITE (246): n equals a,t,g, or c
gcggacgagaatacctgctttttgttttggatagtaccttgtctgtataagaagctggcctttccatagagaggccctggagtctaaaattatgagaacaattaatttatttgtgtcttctattatgatctcgttttgacaataaaaatccttactactttcaaaaaaaaaaaaaaaaaaaaaaaaaaaaaaaaaaaaaaaaaaaaaaaaaaaaaaaaaaaaaaaaaaaaaaaaaaaaaaaaancn

SEQ ID NO: 113 - DNA, 1387 bp, Homo sapiens
  SITE (23): n equals a,t,g, or c
  SITE (104): n equals a,t,g, or c
  SITE (739): n equals a,t,g, or c
  SITE (1378): n equals a,t,g, or c
  SITE (1386): n equals a,t,g, or c
aaaaaaggtagatcttgaatgtnttgtagcacgaataaattgctgtacttcattaagcttcattgccaattagctaggaattgttaagcacattgcagattgtncttggagaattctggagttgttatgaacatgaataccaacggaaaaccttaactgaatctaaaagaaaactattttgaagatggtggtgagctgcaaaatagctggatggatttgaatgattgggatgatacatcattgaactgcactttatataaccaaagcttagcagtttgttagataagagtctatgtatgtctctggttaggatgaagttaattttatgtttttaacatggtatttttgaaggagctaatgaaacactggacatataattggtttaaacataaggggaattaagtctttgtagtctgtcatttttttaagtggatcctcttggatgcgttattttctcatcagctggctcygatcatgaatttgttgtaattttatgttgtactcagtgcatttaagaaatggtagagtattttaatcctattacttgactaagagtgtgaaggtagtactttttagagtgcactgagtgcactttacatctttatttaaattttttttaacatcttatgtttacaggcttcctgtttgatgaagatagcaacggaaaactcaaaatggtggcagttcttattaccagttgttagtatgtttctggaaactgcttgccaagacaacattnattaactgttagaacacttgcwttatgtttgtgtgtacatawtttccacaaatgttataatttatatagtgtggttgaacaggatgcaatcttttgttgtctaaaggtgctgcagttaaaaaaaaaacaaccttttctttcaatatggcatgtagtggagtttttttaactttaaaaacatcaaaaattgttaaaatcattgtgttatctagtagtttataattatcggcttatatttccccatgaatgatcagaactgacatttaattcatgtttgtctcgccatgcttctttactttaacatatttcttttgcagaatgtaaaaggtaatgataattagtttatataagtgtactggctgtaaatgatgctaaatatactttatgcaattaagggcttacagaacatgttgaaactttttttacttttattgggaataaggaatgtttgcacctccacattttattgcttctggatgtgaaatcatgtaattatttctgctgttatataaagtgccatacttttaataaaggaaaatgtacatatgaaaaaaaaaaaaaaaaaaaaaaaaaaaaaaaaaaaaaaaaaaaaaaaaaaaaaaaaaaaaaaaaaaaaaaaaaaaaaaaaaaaaaaaaaanaaaaaaana

SEQ ID NO: 114 - DNA, 363 bp, Homo sapiens
ggcggaccacctccttagggacagaccctggcaggtcgctgcccaccgagatttcctcaagtgtgcatagatctgagaggagtcgggagtcgagactcgagattccatcatagcgtaggtgtgtggggttgggagccccctgatgggcttgtctgtgtttgcaccttgtcctgtgtctgaggtcctgtgactgtaccctcctttgccctgggacatctgtatctcttggctttgtaataaatgctgcatacttaaaaaaagaaaaaaaaaaaaaaaaaaaaaaaaaaaaaaaaaaaaaaaaaaaaaaaaaaaaaaaaaaaaaaaaaaaaaaaaaaaaaaaaaaaaaaaaaaaaaaaaaaaaaa

SEQ ID NO: 115 - DNA, 519 bp, Homo sapiens
  SITE (21): n equals a,t,g, or c
  SITE (40): n equals a,t,g, or c
  SITE (513): n equals a,t,g, or c
  SITE (514): n equals a,t,g, or c
gcacctttggcctggaccttnagggggaaaaattaacccnggatcaaattaaaattaatacagctgtcagcgttcaagtcagggcagttcacaaatagacaagaaaaattgccctcccctaatacatattgggtataattaagcccatatggaagtctctgaattctctcctccagttagaaaatggagtgttggttggccactgttctttgtcatgaagtgaactaggtagtcttttaaaaatacacttgtaaaaccaacagataggccatcccatggcatcttctgagcatgtagcttttccattccaccagaaatataatttgcctcctgaggttgctgatttttatttttcttattttcacaagaaataactatttcttgaaaaacaaagctgaatatcttaaagcaaataaagacctgagaaccttccaaaaaaaaaaaaaaaaaaaaaaaaaaaaaaaaaaaaaaaaaaaaaaaaaaaaaaaaaaaaaaaaaaaaaaaaaaaaaaannggggg

SEQ ID NO: 116 - DNA, 389 bp, Homo sapiens
  SITE (388): n equals a,t,g, or c
gataaaactgatttgttttttacagccaaacctctgtcagttttatgtgacaccaataactattactgtttcagtgttttaaaactgatttgttttttacagccaaacctctgtcagtcagaggcattcattagttttatacatgtaatttgaaaatcactaaacctcgttttctcagcagcaataatttaagaggcttcaaaaatataatttcactcttatttagtattttttcctgggggsatttttacgtaatttttttatgaaaagacaaatgcatgttgagataacttctgggattaaaatagtcttttgctttaaaaaaaaaaaaaaaaaaaaaaaaaaaaaaaaaaaaaaaaaaaaaaaaaaaaaaaaaaaaaaaaaaaana

SEQ ID NO: 117 - DNA, 1342 bp, Homo sapiens
gcgtccgggactgcgtcctcagctcagctttaggactgtgacgacaaagtcttggagatgggttcagaaccaaagaaacaaactctaaactaggcttgaaggaagtgaatttcaatcagcgtttagactagatcaagattgagagctcaggatatgcttctgaggcccttccttctgggcttcattgactagccgccatagcatgggtcttgagaaaaattgccccagccgtctgctgctcctgatcctggtcagtgtgcaaaaacagccagtgaaaagtgccctccaaaagtagctcgggaaggcaacccagacattatttgggaagacaccattgttttattagtggctaagtgtgttttaaatttaaattagaactatgtgaaaaaacaatggtaagtaaatcactttttgttaaagacctttctgggtacatctgttctttaaatatattgatatttaaaatagaaaatattgcccactgtgcctggcctctatattgatatttttaattaaaattccaaaagttagacaattgaagtctaaaaagaatggaacatacaaaatttctgagtgcagtttaaaacattgagtgtaatttgtaagtttcccttaaaataattgtttgaaatttgcttacatagaatcagatttgtaagttgaactatattcttcagagaaaaacaggaatttgaattttaacttcaatacatcgaatactaatttttaaaatcaataagacaaaacaactcttgaatcttttctgtatacagaaatccctctcaagggtacaaaaaaaatcacactgacagaaaacatattttgctgtttgtaccttgacacggcttaactggtggcaaaatgattcctgtgttctgcctgctactatgtagttgcgtagttatcctctaccaccccccaccccatccatgccctgcagctggtgtagatacacaggtgtagagcatgctcctatttttaatccagttacttccgataagagcaggactttgccctttccaccccactccccacctcaagcccctgatgaaggagtttcctttaggtctgtcttctccgaattcctttaggatttaaagtccataccttgcaatttagcacttaatgatatgccctctcttcacagtctctaatactttcaacatgtgtgagtcttgccttcccaagcagactaggaattcttttcttccttattcccacatctttgttccagccagccatctaacagacaaaaaaaaaaaaaaaaaaaaaaaaaaaaaaaaaaaaaaaaaaaaaaaaaaaaaaaaaaaaaaaaaaaaaaaaaaaaaaaaaaaaaaaaaaa

SEQ ID NO: 118 - DNA, 977 bp, Homo sapiens
ccacgcgtccggaagcacttaggatattccctttatgttagggatataaaatgtcatgaaaatttgtctagatttgttttcttttatcagtttgggaaatttgatgattccaaatattttctgtcttcattttgtaggagtacaatcacctagatatagatattttatgtcttttctctcttagctcaaattctcttctcttcgcctttttgctctgtgttccaggaaaattctttgactttatcttcctgtttttctgatggtaatcatgactgacatttatggaagctttttttgcaatcttattatatagcagatttcttgttttataggtgctatgtttcaaaaggcagtagaacgtaagtctaagaatagagattttagaacacctgggtgcctattttggctcagtcacttactgtgtgacattagacatgtttcttaatttctctgaatctagagctctctatctgcttttttataaggacactaggaacattccattagattaagcatgtcaaattctcagttgagagcatggcacatagtaagctctaaataaatgctagcattttgctttcttgaacttcactgatgaatataatctcagtttttctatttgtctttctcttttacggtggcaatatgtttaattatttccaattttctgtttatgtttgagaatatggaactagattcatcatctaggtaggcagtataattttgttctctgctattacacacacacacacacactttctataaaacttgaaaatagcaaaaaccctcaactgttgtaaatcatgcaattaaagttgattacttataaatatgaactttggatcactgtatagactgttaaatttgatttcttattacctattgttaaataaactgtgtgagacagacaaaaaaaaaaaaaaaaaaaaaaaaaaaaaaaaaaaaaaaaaaaaaaaaaaaaaaaaaaaaaaaaaaaa

SEQ ID NO: 119 - DNA, 256 bp, Homo sapiens
  SITE (7): n equals a,t,g, or c
  SITE (8): n equals a,t,g, or c
  SITE (251): n equals a,t,g, or c
ccccccnntttttttttttttttttttttttttttttttttttttttttttttttttttttttttttttgatgcattccatgcattgcagcgtggtccaactttttttctgaaacaggcacacacagacagagcatattttttcctttcactgggaggcaggaatgactggagttgttcaaacaccggtccgttcctgcaattcctatgataaagttgaactaccagaggaatttttttttttttttttanaactg

SEQ ID NO: 120 - DNA, 290 bp, Homo sapiens
  SITE (290): n equals a,t,g, or c
acccacgcgtccggtccaatacttaaagtttgaagcaggttaaatattccttacctcccatactacatctcatgatgtttgcatggtgcataaaagttttgtaagcctgtagtaatttgaaagattaatttttgaccaatttgaaaaagtttttaagcaagttgaagaaccttgacaaayaagcaaagsaggactgattaactgaattagaaaaaaaaaaaaaaaaaaaaaaaaaaaaaaaaaaaaaaaaaaaaaaaaaaaaaaaaaaaaaaaaaaaaaaaaaaaaaaan

SEQ ID NO: 121 - DNA, 384 bp, Homo sapiens
  SITE (6): n equals a,t,g, or c
  SITE (25): n equals a,t,g, or c
  SITE (371): n equals a,t,g, or c
ggggcntaactaatgcaaaataccnatagctggtatgcctgcaggtaccggtccggaattcccgggtcgacccacgcgtcmggttttgagttcttaactgatcgaatgaaggattcaaaattaaccactccaaggggggattgaaggaagaaccactcttaatggacaaaaagaaagaaaggggagggagtaacagggatatgagctctagccgcccaagctagcaatggcaacccttctgggtccccttccagcatgtggaagctttcctttcgcttcattcaataaacagctgctgctcaaaaaaaaaaaaaaaaaaaaaaaaaaaaaaaaaaaaaaaaaaaaaaaaaaaaaaaaaaaaaaaaaaaaangggggggtttttt

SEQ ID NO: 122 - DNA, 222 bp, Homo sapiens; identical to SEQ ID NO: 50
  SITE (11): n equals a,t,g, or c
  SITE (219): n equals a,t,g, or c

SEQ ID NO: 123 - DNA, 592 bp, Homo sapiens
  SITE (121): n equals a,t,g, or c
  SITE (145): n equals a,t,g, or c
  SITE (588): n equals a,t,g, or c
  SITE (591): n equals a,t,g, or c
atacatccctttcccacaaggccacccaactgacccactgggcttctccttttcccttgggacaaaatttagggggccccagtccctcccgccaatgcctgggcctattctgtctctcctnctccccccgggcctgttctgtctntgagctctgtgtcccccgttcattccatggctgggagtcactgatgctgcctctgccttctgatgctggactggccttgcttctacaagtatgcttctcccacagctgtggctgcaggaacttaatttatagggaggagcctgtggcagctgctgccccagccacagctgcactgactgtgctcaccacacatctggggcagccttccctggcaggggccctcgtggcttctcattttccattcccttcmctgtggctaaggggtggggtgaggggatggaragggagggctgcctaccatggtctggggcttgaggaagatgagtttgttgatttaaataaagaatttgtcmtttttgaaaaaaaaaaaaaaaaaaaaaaaaaaaaaaaaaaaaaaaaaaaaaaaaaaaaaaaaaaaaaaaaaaaaaaaaaaaaaaaaaaanaana

SEQ ID NO: 124 - DNA, 1290 bp, Homo sapiens
  SITE (1273): n equals a,t,g, or c
  SITE (1290): n equals a,t,g, or c
gtaaacttaatatgctggtattgtttattcattttatatgaatattcattgaaaatatattgtgtatatattttcaatgaatattcatatatgtaatacacagcacttgattacaaaatgtaatttaattatattattgctggcagcattcagttaagagggtactttaaaaaatagaagtcagctttcacatctgatttctgtatgggctgtacttggttaacttgattttagaaaaaggactaacagaattgctaaagaaatgcatccaataaatgaaaaacagtaggaagatcaaatgtttttgkcaaatatattcacaacttgrccagattagctgtcctgtttgtaatgcaatattaatatgtcttttgggaaaaagcctacatatggaataaaataagtattgaagaatttttctttgtaacaatttagtagtcactgtttattgagaaattgttttttattttgtaaaataacatgatgttagtgttgaactcttaaacagaaagaaagcttaatataacagcttatagaacttgaactactaaatatgaaaataagtcatttgaaaaaaatacagtatgtaaaatttgttcattcgttgaggtaatggtgctatgtttttacaaaattgttcctacaccttttttctacttcaggtattttatttcaaccatttccatcaattgaactgttaccattgcctttttctgttgagaaattgcctctgaaaaatagtgctatttttcagcttaagtgttcttaagtgaatgaaattttcaaagtactagatcaccttaaaattatttcacgtactgaagacaattaagtccgttatgtttagagtagaaaatgtttaggttaaagagcatctgtcaacagaatctacaaaaaagattcccttgcatttgaattagttctctattctcctattgctaaatgtgtgatatatagagaggatgtataaaaggaaatggaaatagactatgtacttgtctggtttttgtttgtttttattttggaatgcttataagcctcctttacactgaataaggaagtagtttttgttttcttttgacctgtaaaatacctcacatggttgtttttacacatgaaagaaaaaggtatatgcgaacatacctgatatcaagaggagtatgcaccaaataaattttagctttgataaaactttccataaaaaaaaaaaaaaaaaaaaaaaaaaaaaaaaaaaaaaaaaaaaaaaaaaaaaaaaaaaaaaaaaaaaaaaaanccccgggggggggcccn

SEQ ID NO: 125 - DNA, 1303 bp, Homo sapiens
  SITE (900): n equals a,t,g, or c
  SITE (1296): n equals a,t,g, or c
  SITE (1303): n equals a,t,g, or c
tatggctctttcaggaaaagtgaaatcagagaggcgtaccctagccacagctgttgtattctgctcttctttcctttttggtgagcttcatgggtggagttatcagtggtctgtactttgtggatattttgcccagcaggaagtattagacacatcagtctagaagcattgtgaaaaggttccaaaacgggagacaaaatttaattcattcctcagttctgaaagtttgtgctttcttaccatgaatagatgaaaacttgaaaaaaatcttgacagtttactaatgtgaatcagatgtaacgtactactaattctacaatgcctttctctttagtcagtattaaaaatcttttttaaagtattggtatgaaaacaaatttttgttgccctgataatggaattttaaaactacccacagtttaagagaaaacataacttggtaaaaaaggtagccaataaaaccacaatttgaaattgataccattttctactcacaatggatgatgaaaaatttcacctttaaatgggtcagaagttgtctttgacatttaccatgaaaaaactacataaaatggctccctggtgaggttacagacacggccctggtgatgggcgttgcaaagttttcactgagcacacagcaatggtatcacctagagaagttcacgcaactttgttgaatgtagttgacttttccaaatttataaaggaaggaagaaggcaaatgttaatttgccaacaacgaatatcctttttctaaatcagatcattccttttttgttagtggcagtttatcctgtaatttcaaatgacgttaagaggtgggattatttgggggttttttttgtttgtttacagatgatctcatttgctgaatgattgatttaagagtaaaattanccactgcgtggctttgtgtatagtaaccggttttgttgcacttgtctgtggctgaaacacttacctgcagtggaaagccgagcaaggaggaggtaaacattggagatgtttgtgaaaatattactcttgctgtgaggttttagtttgttttgaatgagaaaagactaagtaacttaatccatctcaatgtagtgttttaataaaaaaggaacctaatatttgaaatgggtctcagacatgtctacaaatatgggtactatttttatgcccgtgtattttcacatttaataaaaatatttatggtcatatcagtaaaaaaaaaaaaaaaaaaaaaaaaaaaaaaaaaaaaaaaaaaaaaaaaaaaaaaaaaaaaaaaaaaaaaaaaaagggaaaaancgaaaan

SEQ ID NO: 126 - DNA, 314 bp, Homo sapiens
  SITE (303): n equals a,t,g, or c
  SITE (309): n equals a,t,g, or c
  SITE (314): n equals a,t,g, or c
ggtactcttgtgtgtctggctgcttttgctcagcctatctgtgagattcctcttcactgtcacatgtaccagaggtttgttcattttattgctgttcggtgttgcctcgtatgaatacaccacagttggctcactctcctgttgatgggcttttggattggttccctttttttgacaattgtgaataaagctgctctgagcattaaaaaaaaaaaaaaaaaaaaaaaaaaaaaaaaaaaaaaaaaaaaaaaaaaaraaaaaaaaaaaaaaaaaaaaaaaaaaaaaaaaaaaaaaaaaaaaaangggggnccccn

SEQ ID NO: 127 - DNA, 174 bp, Homo sapiens; identical to SEQ ID NO: 55

SEQ ID NO: 128 - DNA, 317 bp, Homo sapiens
  SITE (305): n equals a,t,g, or c
  SITE (311): n equals a,t,g, or c
  SITE (312): n equals a,t,g, or c
acccacgcgtccgatttttattctggtatctaatcagattcctaatcatagcccgtaagaaggaatgttactttaatattggactttgctcatgtgctcgtgtccgcatttttttttttcttaaaatcatagccatatggtaaattttctattttgttatggttctcttttattgatgggcatgcagtgggtgttacttggaaatggccaatttttattaaaatatttctggaagaaaaaaaaaaaaaaaaaaaaaaaaaaaaaaaaaaaaaaaaaaaaaaaaaaaaaaaaaaaaaaaaaaaaangggggnnccccc

SEQ ID NO: 129 - DNA, 362 bp, Homo sapiens
  SITE (322): n equals a,t,g, or c
  SITE (323): n equals a,t,g, or c
  SITE (341): n equals a,t,g, or c
tcgatccacgcgtccgcggacgcgtgggcggacgcgtggggtttctcttccctctccattggaaatcttgctccggaggtccgaaacacgtattttaagcgtgcccttcctcacctcctggagcacccttagaagtattgcctacttatccgggctgagaatccttcatttttgacctggcttttttttcgccctttgggagataaaggtccttctccaccctctaccccctctagagcaaaaaaaaaaaaaaaaaaaaaaaaaaaaaaaaaaaaaaaaaaaaaaaaaaaaaaaaaaaaaaaaaaaaaaaaaaaaaaaaaannaaaaaagataaaaagganccaaaaattaaaaaaaaaaaa

SEQ ID NO: 130 - DNA, 565 bp, Homo sapiens
  SITE (563): n equals a,t,g, or c
  SITE (564): n equals a,t,g, or c
tgaaagagctaccaaaatagtctatattgtgtgaacaatctcttgggatattagacgtgtttaaagaccagtgttgctgctatttttaatattttggttaatttaagtgaaatgtacatattttaatttgaagatttatcttgcccatcagaatgtgaagatatacttgcatatatttgacatatttcatggaaaataaaaatgataatccactttgtgagtgtaagtgaatgtattcatatgtatgttattataaatgatttttgtttgcactgatgatgaaatgagagttttgggggctttttatacatttatatcgactggtctctaaatctcctattttgttttcttatcatttttgaaatacagttcccattacatgagttttaaatagattggtgtttcattttgtattatgctactactagatgttgattctctggtattgtaaaataaaatgtgctccaaaaacccaaaaaaaaaaaaaaaaaaaaaaaaaaaaaaaaaaaaaaaaaaaaaaaaaaaaaaaaaaaaaaaaaaaaaaaaaaaaaaaaaaaaaaaanng

SEQ ID NO: 131 - DNA, 698 bp, Homo sapiens
  SITE (687): n equals a,t,g, or c
  SITE (688): n equals a,t,g, or c
  SITE (692): n equals a,t,g, or c
  SITE (696): n equals a,t,g, or c
  SITE (698): n equals a,t,g, or c
tcttacttcctagatgtggccaaaaaaagccatttaaaaaaaatctttacatctgccagaaatagggctcatgggagcacgtgggagggtgttcccctcgytcagcacatggaataacactttatgaatacttaatacatataaatcggcatgctaaacattgtaaatttatcatctaacttaatcccaaggaaagaaaagaacttttatcgaggaatgtgggctctttcaaattattaggcccagagaagcattcaaatgatacggcaatcacatcttattctccccctttagagctatgtattcatctgtcaaaactgcctgctattgccacaagtagctatgaattaacctaataacacctcactggacacaacatcccacactctaaggcttaacaatgggtagccaatcactaatcaatgttatttctgtaaatcaatgagaatccgcggcagaactttgtatcagtccaatccttgtccccctccttttttgcctttaaaaatctgcctgtaataaaggccaagtggagctcawaaaaaaaaaaaaaaaaaaaaaaaaaaaaaaaaaaaaaaaaaaaaaaaaaaaaaaaaaaaaaaaaaaaaaaaaaaaaaaaaaaaaaaaaaaaaaaaaaaaaaaaaaaaaaaaaaaaaaaaaaaaaaaaaaaaaaaaaaaaaagggggnncccntttnan

SEQ ID NO: 132 - DNA, 377 bp, Homo sapiens
  SITE (365): n equals a,t,g, or c
  SITE (367): n equals a,t,g, or c
tttgcacagatcgttgttagatctttatktttagccatgcactgttgtgaggaaaaattacctgtcttgactgccatgtgttcatcatcttaagtattgtaagctgctatgtatggatttaaaccgtaatcatatctttttcctatctatctgaggcactggtggaataaaaaacctgtatattttactttgttgcagatagtcttgccgcatcttggcaagttgcagagatggtggagctagaaaaaaaaaaaaaaaaaaaaaaaaaaaaaaaaaaaaaaaaaaaaaaaaaaaaaaaaaaaaaaaaaaaaaaaaaaaaaaaaaaaaaaaaaaaaaaaaaaaaaaagggggggccgttttaaagnanccaagtttac

SEQ ID NO: 133 - DNA, 176 bp, Homo sapiens
  SITE (12): n equals a,t,g, or c
  SITE (146): n equals a,t,g, or c
tctaaatacgantcactatagagaaagctggtacgcctgcasgttaccggtccggaaattcccgggtcgacccacgcgtccgaaaaaaaaaaaaaaaaaaaaaaaaaaaaaaaaaaaaaaaaaaaaaaaaaaaaaaaaaaaaaaanaaaaaaaaaaaaaaaggggggggggggggc

SEQ ID NO: 134 - DNA, 250 bp, Homo sapiens
  SITE (249): n equals a,t,g, or c
  SITE (250): n equals a,t,g, or c
gccctgttatctaaagaatctttgtaagatttttgtaaaattttgttttacaagattttatttgaaattgttttttgcaagattgttatatttctgtatgaatgtattttttattggaataacataaaagaattcttatcagcaaaaaaaaaaaaaaaaaaaaaaaaaaaaaaaaaaaaaaaaaaaaaaaaaaaaaaaaaaaaaaaaaaaaaaaaaaaaaaaaaaaaaaaaaaaaaaaaaaaaaaaaann

SEQ ID NO: 135 - DNA, 671 bp, Homo sapiens
  SITE (3): n equals a,t,g, or c
  SITE (5): n equals a,t,g, or c
  SITE (9): n equals a,t,g, or c
ggncncccntttttttttttttttttttttttttttttttttttttttttttttttttttttttttttttttttttttttttttttttttttttttttttttttttttttttttttttttttttgtatgagcaccctctaaggaagcagtctttatttgcatttttagagtgaacacatatatgaaaaacactgcaacaggttgacacaatgctcagtccctttttaagtgaattcctggggagaaagtcaaggaccttagggagcagagcagtggaatgcaaacacagaaattacctatgagtcacttttgtgagccaatgacacggcctcactgcagccattccaagaagtatctttgctcacggtaaatgcraagtaaacaarataccacactgcatatttgaaacaaacaaatgtgacgttgcctatactggcctcatgtgcagaaggaattttggtcagacaatgacaaaaaggagaatacaaaacagattgtggaatggaattgaaagcacaattctttgtatctgggaacgtttcactggcaacactaactgtattatacaggcgttacctggaacggtagttatgtttccactcctatcccaaagaggctccttggaggattgaacgcaatgggggagggtgttgtatccaggtaattccgtg

SEQ ID NO: 136 - DNA, 713 bp, Homo sapiens
  SITE (393): n equals a,t,g, or c
  SITE (711): n equals a,t,g, or c
ggcaccaccctccaaaacctttgcgagcagcgtttccactcaagattaacgccgacttcttggtgacagttcttgcacaaggagcctttaaacctggaacattttggaccttggcgccaccaagggcaaacttggaaaagccccaggcgcaacttctggggacaacttaaggagcccacggggcaagacatccgaatccgaatcgargccaacgaggccctgktkaaggccctggagtaggcggtgcgtacccggygtcccgaggcccggccaggggctgggcagggatgccaggtggscccagccagctcctggggtcccggccacctggggaagccgcgcctgccaaggaggccaccagagggcagtgcaggcttctgcctgkgccccagnccctgcctgtgttgaaagctctggggactgggccagggaagctcctcctcagctttgagctgtggctgccacccatggggctctccttccgcctctcaagatccccccagcctgacgggccgcttaccatcccctctgccctgcagagccagccgccaaggttgacctcagcttcggagccacctctggatgaactgcccccagcccccgccccattaaagacccggaagcctgaaaaaaaaaaaaaaaaaaaaaaaaaaaaaaaaaaaaaaaaaaaaaaaaaaaaaaaaaaaaaaaaaaaaaaaaaaaaaaaaaaangg

SEQ ID NO: 137 - DNA, 658 bp, Homo sapiens
  SITE (633): n equals a,t,g, or c
  SITE (637): n equals a,t,g, or c
  SITE (651): n equals a,t,g, or c
agttaattgtgttttcgagcttgaatctcacctgtgattttttttttttaatgttgtttcatgacttgatttttcycataagccaatgtatttgtaggtttackggattttatttttagggagtgggtaatttcttcccttttttgattaagttggttcagctatggtgctattcagtaggtatcttcagtgtcaggtcccgtagctgaatgccattgttattataattattatttgtaatcacattgtaagcttgaatttgggcttgtacctgcatcttttgtattctgtacatctggttacttagactttgggagtccaatttggtttcagtcatgtatgtctactttgtagtttaagtagacttcatcaactatggtctattttgggtttgtagttttaatttagaattgtgttaaattgatgttttgcatttgacttcatttgacattagttgaagtaaattatttaatttttgaattctggaatttgaacatttactgtaatttgtaatataactgctgtgaaatacttgaataaagatgacaagaaaaacaaaaaaaaaaaaaaaaaaaaaaaaaaaaaaaaaaaaaaaaaaaaaaaaaaaaaaaaaaaaaaaaaaaaaaaaaaaangggnggccgttttaaagnatccaag

SEQ ID NO: 138 - DNA, 792 bp, Homo sapiens
  SITE (45): n equals a,t,g, or c
  SITE (773): n equals a,t,g, or c
  SITE (777): n equals a,t,g, or c
ctctacaaattgtacgaacctttcagccagcatggtgtttgccangattatgtataattatgtataatttaactttcaagacttgacttggaagttactttgaaacaaacagtctaggaaaatgaaaaactaaaccactcagcacctatggacatactaaagatggtgactatggtgatgccaaacttcacagaaacaaattctaaaatgaggacagtctgtacttcctgctgattatataaaatcactgccaagaaaaacacastacccgtactttcaatctttcaatgttacaacctgttactattcaaatsctttagtcactgctcaattcttgccttatctagtaatgtaaatctacgtaggctctgtctgctttaaaacagctaacacatgtaagtctgaagaaaccaatgggtacgaaagcacaagtgagcaaaattaaagagcagaattgtactgagtggctttatatgttcatctagtaccagaggctccacttttttttcctttgccaacaggccaccaagctacccctgaaaactaccatatgcctcaaatagtagttataaatgcttataagtacactagactgtaagaactccactaaattgttataggctggtatcttttgagatgacaccaaaattaaaatttggagcattaaaaataaaactaaattttactttacaaacaagaaaaaaaaaaaaaaaaaaaaaaaaaaaaaaaaaaaaaaaaaaaaaaaaaaaaaaaaaaaaaaaaaaaaaaaaaangggnggccgttttaaagga

SEQ ID NO: 139 - protein, 255 aa, Homo sapiens
  SITE (1): Xaa equals any of the naturally occurring L-amino acids
  SITE (18): Xaa equals any of the naturally occurring L-amino acids
  SITE (19): Xaa equals any of the naturally occurring L-amino acids
  SITE (39): Xaa equals any of the naturally occurring L-amino acids
XPEEPDCGRRKGAAGAAXXSPGPGAEASALPGDGATRGXGGGLYSAKAPNFMWRICVRRKLSLNFLLLPINAVPRGDFGAGQRPGPLPGAPAASALVDHLQVQDDAVPLGLPRLHLAVDDAHRLREGRNGRAQSGAAPLRVRAGQGTAGHTVAAADVLLEPVHGCAGVQLGRGGTGARLDREMHITDAEGLGLGPRLQEESFGFGSPLLGPIQLTLPLLLFEGCNEPRVQDVLLGLPSAVLDRPPLPFHQVLDAS

SEQ ID NO: 140 - protein, 477 aa, Homo sapiens
RRTQLKQSVGRPAPAPAPTLPLPPATPPPTMASEELYEVERIVDKRKNKKGKTEYLVRWKGYDSEDDTWEPEQHLVNCEEYIHDFNRRHTEKQKESTLTRTNRTSPNNARKQISRSTNSNFSKTSPKALVIGKDHESKNSQLFAASQKFRKNTAPSLSSRKNMDLAKSGIKILVPKSPVKSRTAVDGFQSESPEKLDPVEQGQEDTVAPEVAAEKPVGALLGPGAERARMGSRPRIHPLVPQVPGPVTAAMATGLAVNGKGTSPFMDALTANGTTNIQTSVTGVTASKRKFIDDRRDQPFDKRLRFSVRQTESAYRYRDIVVRKQDGFTHILLSTKSSENNSLNPEVMREVQSALSTAAADDSKLVLLSAVGSVFCCGLDFIYFIRRLTDDRKRESTKMAEAIRNFVNTFIQFKKPIIVAVNGPAIGLGASILPLCDVVWANEKAWFQTPYTTFGQSPDGCSTVMFPKIMGGASWEK

SEQ ID NO: 141 - protein, 148 aa, Homo sapiens
  SITE (35): Xaa equals any of the naturally occurring L-amino acids
VNGQVVCAVPHNLESKSPAAPGQSPTGSVCYERNXEVFYLTYTPEDVEGNVQLETGDKINFVIDNNKHTGAVSARNIMLLKKKQARCQGVVCAMKEAFGFIERGDVVKEIFFHYSGFKGDLETLQPGDDVEFTIKDRNGKEVAQMSDY

SEQ ID NO: 142 - protein, 303 aa, Homo sapiens
  SITE (227): Xaa equals any of the naturally occurring L-amino acids
HEVKWFNVRNGYGFINRNDTKEDVFVHQTAIKRNNPRKFLRSVGDGETVEFDVVEGEKGAEATNVTGPGGVPVKGSRYAPNRRKSRRFIPRPPSVAPPPMVAEIPSAGTGPGSKGERAEDSGQRPRRWCPPPFFYRRRFVRGPRPPNQQQPIEGTDRVEPKETAPLEGHQQQGDERVPPPRFRPRYRRPFRPGHASSLPQKVGMVRPSPAKVPLMVPGLSPSAHETXPTSSGDGSRPLAPSRPLAPGSPQPLRPQPLSTVGTPPPPSWSDSNSTQRTPRAAIWYLPVFPNDLYPTQYPAPPFP

SEQ ID NO: 143 - protein, 167 aa, Homo sapiens
KFLRSVGDGETVEFDVVEGEKGAEATNVTGPGGVPVKGSRYAPNRRKSRRFIPRPPSVAPPPMVAEIPSAGTGPGSKGERAEDSGQRPRRWCPPPFFYRRRFVRGPRPPNQQQPIEGTDRVEPKETAPLEGHQQQGDERVPPPDSGPGTEGLSAQATPAAYHRRWGW

SEQ ID NO: 144 - protein, 165 aa, Homo sapiens
HEQLKHLESFYEKPPPGLIKEDETKPEDCIPDVPGNEHAREFLAHAPTKGLWMPLGKEVKVMQCWRCKRYGHRTGDKECPFFIKGNQKLEQFRVAHEDPMYDIIRDNKRHEKDVRIQQLKQLLEDSTSDEDRSSSSSSEGKEKHKKKKKKEKHKKKKKKKKKKKK

SEQ ID NO: 145 - protein, 181 aa, Homo sapiens
  SITE (28): Xaa equals any of the naturally occurring L-amino acids
  SITE (62): Xaa equals any of the naturally occurring L-amino acids
  SITE (64): Xaa equals any of the naturally occurring L-amino acids
  SITE (152): Xaa equals any of the naturally occurring L-amino acids
  SITE (160): Xaa equals any of the naturally occurring L-amino acids
  SITE (162): Xaa equals any of the naturally occurring L-amino acids
  SITE (163): Xaa equals any of the naturally occurring L-amino acids
  SITE (173): Xaa equals any of the naturally occurring L-amino acids
  SITE (178): Xaa equals any of the naturally occurring L-amino acids
  SITE (180): Xaa equals any of the naturally occurring L-amino acids
  SITE (181): Xaa equals any of the naturally occurring L-amino acids
EELNQLLKGVTIASGGVLPNIHPELLAXKRGSKGKLEAIITPPPAKKAKSPSQKKPVSKKAXGXKGARKSKKQGEVSKAASADSTTEGTPADGFTVLSTKSLFLGQKLQVVQADIASIDSDAVVHPTNTDFYIGGEVGNTLEKKGGKEFVEXVLELRKKXGXXEVLELACSRXPLGLXAXX

SEQ ID NO: 146 - protein, 49 aa, Homo sapiens
TYLECEHNSLVNSKCLTVVLSRCISVCLNKFYFVCKKKKKKKKKKKKKK

SEQ ID NO: 147 - protein, 39 aa, Homo sapiens
  SITE (35): Xaa equals any of the naturally occurring L-amino acids
NKDYFEDLKKKKKKKKKKKKKKKKKKKKKKKKKGXAALG

SEQ ID NO: 148 - protein, 80 aa, Homo sapiens
  SITE (1): Xaa equals any of the naturally occurring L-amino acids
  SITE (4): Xaa equals any of the naturally occurring L-amino acids
XNSXYSESYYNSLAVVLQRRDWENPGVTQLNRLAAHPPFASWRNSEEARTDRPSQQLRSLNGEWQIVSVNILLKFALNFC

SEQ ID NO: 149 - protein, 119 aa, Homo sapiens
RAVRTCACTSLMWSGRPRLLSTSCRATVHLCLMSASTATRAYWPPVTPAAWSSSGGGSRSRVLSALLLSSIPPLLLQPRVVNKVSVVMLRAGSQLCRGRTGQRAAGSSRNPVKKKKKKK

SEQ ID NO: 150 - protein, 165 aa, Homo sapiens
GHSTSVHPHGALTTQQPGQSVTDRGFLSGLNSCLSGDVSVPSPFPLNSWIWPQVAPPGLSSPEAMPRVHPWATPHQVPAAFTWGRGPMSATWTPTACHGIQKPLSPLGSAKDTSSISWSDPRQAQNTGQVLLERSQEWAWGLENSSTDSSGFHINPARKKMKNSS

SEQ ID NO: 151 - protein, 51 aa, Homo sapiens
FFFFFFFFFFFFFFFFFFFFFFFLVTQEVYLTSPGSSLTISRKQEVLQPPQ

SEQ ID NO: 152 - protein, 87 aa, Homo sapiens
  SITE (77): Xaa equals any of the naturally occurring L-amino acids
KHFYISTKITFSTCLNIKAVVIWKSLVNRCARGAHIGCICYHMLGNKIILLKKKKKKKKKKKKKKKKKKKKKKKKKXKKKKKKKKKG

SEQ ID NO: 153 - protein, 104 aa, Homo sapiens
  SITE (100): Xaa equals any of the naturally occurring L-amino acids
  SITE (102): Xaa equals any of the naturally occurring L-amino acids
GPHPGGGPWGGDREVALKNTAVLILHSMGPHPGGGGGSHCICWLRAPACASRAPGLLCLLSVPISIKGLPLGGQKKKKKKKKKKKKKKKKKKKKKKKKKXGXPF

SEQ ID NO: 154 - protein, 96 aa, Homo sapiens
FFFFLQNQFLFLNYTVRLYRYIVSLKTFILLIYIMENLFTKTKSNRHFILSNPMHDRKTFRYIKHLDVHKLIFYISKGFSNRHFILSNPMPDAWVD

SEQ ID NO: 155 - protein, 98 aa, Homo sapiens
  SITE (11): Xaa equals any of the naturally occurring L-amino acids
  SITE (18): Xaa equals any of the naturally occurring L-amino acids
  SITE (30): Xaa equals any of the naturally occurring L-amino acids
  SITE (33): Xaa equals any of the naturally occurring L-amino acids
  SITE (42): Xaa equals any of the naturally occurring L-amino acids
  SITE (48): Xaa equals any of the naturally occurring L-amino acids
  SITE (69): Xaa equals any of the naturally occurring L-amino acids
  SITE (71): Xaa equals any of the naturally occurring L-amino acids
  SITE (73): Xaa equals any of the naturally occurring L-amino acids
PVSYMVFAILXLFFFFFXFGDGISLCRSGXNAXAQSWLTATXASPVQXILLPQPGLHEETLSASNTKIXRXWXGMPVTPGTWEGEAGESLDPGWWRLQ

SEQ ID NO: 156 - protein, 48 aa, Homo sapiens
  SITE (27): Xaa equals any of the naturally occurring L-amino acids
  SITE (48): Xaa equals any of the naturally occurring L-amino acids
QKKKKKKKKKKKKKKKKKKKKKKGGRXRGSLEGPKLTRACDVIALSLX

SEQ ID NO: 157 - protein, 134 aa, Homo sapiens
  SITE (39): Xaa equals any of the naturally occurring L-amino acids
  SITE (100): Xaa equals any of the naturally occurring L-amino acids
  SITE (105): Xaa equals any of the naturally occurring L-amino acids
NTGFLILSVKCSILMSQPLTSVDNDLTTSCNPSKSIFLXDLFCGHSFSREAFGLKLLRFEKLLAASWCPREDQLPVSHGASSSGSSVRVWALVCSPGGQXWGLGXRSAWPFAHLSAYLFCRSGAAVSSGCFCVN

SEQ ID NO: 158 - protein, 80 aa, Homo sapiens
FFFFFFFFFFFFFFFFFFFFFFFFFFFFFFFFFFFFLGLKYLFAIDNLIYINTESFYIPKSDTNRCFILVNYKGKQKGNC

SEQ ID NO: 159 - protein, 68 aa, Homo sapiens
DKATKLTKFRSYAAVILKIHFVLTWVILFRRKIIRDETLKLLDLISLSVGKGQCYRVVFFWFFFFFLR

SEQ ID NO: 160 - protein, 118 aa, Homo sapiens
SKMSGRSGKKKMSKLSRSARAGVIFPVGRLMRYLKKGTFKYRISVGAPVYMAAVIEYLAAEILELAGNAARDNKKARIAPRHILLAVANDEELNQLLKGVTIAMEASCQNSPRTAGQK

SEQ ID NO: 161 - protein, 71 aa, Homo sapiens
FFFFFFFFFFFFFFFFFFFFFFFFFFKKTVKFYLLCNHFQSRQRNRSDIPTVLTTENSHNHFIEIVLFFLN

SEQ ID NO: 162 - protein, 53 aa, Homo sapiens
KSLKWNIVLRSNSPPSQKWPRCNKNCGILKKKKKKKKKKKKKKKKKKKKKKKK

SEQ ID NO: 163 - protein, 66 aa, Homo sapiens
  SITE (4): Xaa equals any of the naturally occurring L-amino acids
  SITE (56): Xaa equals any of the naturally occurring L-amino acids
VTLXKVRLQVPVRNSRVDPRVRSSRSRAASMTFSKKKKKKKKKKKKKKKKKKKKKXGKKKKRGGGG

SEQ ID NO: 164 - protein, 50 aa, Homo sapiens
FSARCFFLFVFNSIQSIQFLKHIKIICLLKKKKKKKKKKKKKKKKKKKKK

SEQ ID NO: 165 - protein, 61 aa, Homo sapiens
  SITE (8): Xaa equals any of the naturally occurring L-amino acids
SLPPSALXGSSDSCVSASRVVGIYKSIFFLTKTTESIFLGLILSFLCSHLVNNLICLFSPH

SEQ ID NO: 166 - protein, 61 aa, Homo sapiens
ESSKDFYCQNEIIIEDTNKLIVLIILDSRASLWKGQLLIQTRYYPKQKAGILVRSCRIPAA

SEQ ID NO: 167 - protein, 107 aa, Homo sapiens
VHFTSLFKFFFNILCLQASCLMKIATENSKWWQFLLPVVSIVSGNCLPRQHLLTVRTLALCLCVHIFHKCYNLYSVVEQDAIFCCLKVLQLKKKQPFLSIWHVVEFF

SEQ ID NO: 168 - protein, 96 aa, Homo sapiens
FFFFFFFFFFFESMQHLLQSQEIQMSQGKGGYSHRTSDTGQGANTDKPIRGLPTPHTYAMMESRVSTPDSSQIYAHLRKSRWAATCQGLSLRRWSA

SEQ ID NO: 169 - protein, 108 aa, Homo sapiens
HFGRPRQTDELKSGVRDQPGQHGETLFLLKIQKLHLLSQLLRRLRQENHLNPGGRGCSEPRLCHYISDLGNRVRPCLKKKKKKKKKKKKKKKKKKKKKKKKKKKKKKK

SEQ ID NO: 170 - protein, 88 aa, Homo sapiens
FFFFFFFFFFFFFFFFFFFFFFFFFFLEGSQVFICFKIFSFVFQEIVISCENKKNKNQQPQEANYISGGMEKLHAQKMPWDGLSVGFT

SEQ ID NO: 171 - protein, 50 aa, Homo sapiens
DKTDLFFTAKPLSVLCDTNNYYCFSVLKLICFLQPNLCQSEAFISFIHVI

SEQ ID NO: 172 - protein, 75 aa, Homo sapiens
LRNYIVAGRTQESFCHQLSRVKVQTAKYVFCQCDFFCTLERDFCIQKRFKSCFVLLILKISIRCIEVKIQIPVFL

SEQ ID NO: 173 - protein, 64 aa, Homo sapiens
KVRLQVPVRNSRVDPRVRKHLGYSLYVRDIKCHENLSRFVFFYQFGKFDDSKYFLSSFCRSTIT

SEQ ID NO: 174 - protein, 77 aa, Homo sapiens
PNGLKKGKDKNNNKKLEPKYQCSPSLVYFFISAVVKKKKKIPLVVQLYHRNCRNGPVFEQLQSFLPPSERKKYALSV

SEQ ID NO: 175 - protein, 82 aa, Homo sapiens
FFFFFFFFFFFFFFFFFFFFFFFFFFFFFFFFFFFFLIQLISPALLVCQGSSTCLKTFSNWSKINLSNYYRLTKLLCTMQTS

SEQ ID NO: 176 - protein, 73 aa, Homo sapiens
  SITE (66): Xaa equals any of the naturally occurring L-amino acids
  SITE (72): Xaa equals any of the naturally occurring L-amino acids
LGRLELISLLLPPLSFFLSIKSGSSFNPPLEWLILNPSFDQLRTQNRTRGSTREFRTGTCRHTSYXYFALVXP

SEQ ID NO: 177 - protein, 63 aa, Homo sapiens
PTNNPRVSLPHIKPSFCKLRAASFDCGEAAWQVSKLTLLKKKKKKKKKKKKKKKKKKKKISWG

SEQ ID NO: 178 - protein, 60 aa, Homo sapiens
  SITE (1): Xaa equals any of the naturally occurring L-amino acids
XFFFFFFFFFFFFFFFFFFFFFFLSMDLYMTYTNYMGIKVNDGYALGSYLMRNLRKVLIS

SEQ ID NO: 179 - protein, 72 aa, Homo sapiens
HELTGALVASHFPFPSLWLRGGVRGWRGRAAYHGLGLEEDEFVDLNKEFVIFEKKKKKKKKKKKKKKKKKKK

SEQ ID NO: 180 - protein, 57 aa, Homo sapiens
EQFCKNIAPLPQRMNKFYILYFFQMTYFHISSSSSISCYISFFLFKSSTLTSCYFTK

SEQ ID NO: 181 - protein, 74 aa, Homo sapiens
NLTARVIFSQTSPMFTSSLLGFPLQVSVSATDKCNKTGYYTQSHAVANFTLKSIIQQMRSSVNKQKKPPNNPTS

SEQ ID NO: 182 - protein, 101 aa, Homo sapiens
FFFFFFFFFFFFFFFFFFFFFFFFFFFFFFFFNAQSSFIHNCQKKGTNPKAHQQESEPTVVYSYEATPNSNKMNKPLVHVTVKRNLTDRLSKSSQTHKSTP

SEQ ID NO: 183 - protein, 58 aa, Homo sapiens
FFFFFFFFFFFFSFFFFFFFFFFFFSTEVQVRDKIITDTLLSSSRGRVGRPTRPPTRP

SEQ ID NO: 184 - protein, 58 aa, Homo sapiens
FFFFFFFFFFSSRNILIKIGHFQVTPTACPSIKENHNKIENLPYGYDFKKKKNADTST

SEQ ID NO: 185 - protein, 63 aa, Homo sapiens
KYCLLIRAENPSFLTWLFFRPLGDKGPSPPSTPSRAKKKKKKKKKKKKKKKKKKKKKKKKKKK

SEQ ID NO: 186 - protein, 50 aa, Homo sapiens
FFFFFFFFFFFFFFFFFFGFLEHILFYNTRESTSSSSIIQNETPIYLKLM

SEQ ID NO: 187 - protein, 60 aa, Homo sapiens
FFFFFFFFFFFFFFFFFFGYELHLAFITGRFLKAKKEGDKDWTDTKFCRGFSLIYRNNID

SEQ ID NO: 188 - protein, 71 aa, Homo sapiens
FFFFFFFFFFFFFFFFFFFFFFFFFFFFFFFFFFLAPPSLQLAKMRQDYLQQSKIYRFFIPPVPQIDRKKI

SEQ ID NO: 189 - protein, 61 aa, Homo sapiens
  SITE (4): Xaa equals any of the naturally occurring L-amino acids
  SITE (9): Xaa equals any of the naturally occurring L-amino acids
  SITE (14): Xaa equals any of the naturally occurring L-amino acids
LNTXHYREXWYACXLPVRKFPGRPTRPKKKKKKKKKKKKKKKKKKKKKKKKKKKKKGGGGG

SEQ ID NO: 190 - protein, 74 aa, Homo sapiens
  SITE (74): Xaa equals any of the naturally occurring L-amino acids
DFCKILFYKILFEIVFCKIVIFLYECIFYWNNIKEFLSAKKKKKKKKKKKKKKKKKKKKKKKKKKKKKKKKKKX

SEQ ID NO: 191 - protein, 68 aa, Homo sapiens
  SITE (66): Xaa equals any of the naturally occurring L-amino acids
  SITE (67): Xaa equals any of the naturally occurring L-amino acids
AAPGSPGVRRYPRKLCPSALAHRECPALKIWSFLFPEKKKKKKKKKKKKKKKKKKKKKKKKKKKGXXF

SEQ ID NO: 192 - protein, 72 aa, Homo sapiens
FLCLHSTALLPKVLDFLPRNSLKKGLSIVSTCCSVFHICVHSKNANKDCFLRGCSYKKKKKKKKKKKKKKKK

SEQ ID NO: 193 - protein, 79 aa, Homo sapiens
  SITE (8): Xaa equals any of the naturally occurring L-amino acids
SILTHYQXAKPGTACRYRSGNSRVDPRVRPRVRPRVRPRVRKKKKKKKKKKKKKKKKKKKKKKKGGRFRGSKLTYALHC

SEQ ID NO: 194 - protein, 161 aa, Homo sapiens
GRPTRPDPDPNRGQRGPGEGPGVGGAYPVSRGPARGWAGMPGGPSQLLGSRPPGEAAPAKEATRGQCRLLPGPQALPVLKALGTGPGKLLLSFELWLPPMGLSFRLSRSPQPDGPLTIPSALQSQPPRLTSASEPPLDELPPAPAPLKTRKPEKKKKKKKK

SEQ ID NO: 195 - protein, 61 aa, Homo sapiens
FFFFFFFFFFFFFFFFFLVIFIQVFPTSYIPNYSKCSNSRIQKLNNLLQLMSNEVKCKTSI

SEQ ID NO: 196 - protein, 86 aa, Homo sapiens
GKDAILNHKYSHFVFLFLKGLPVALDKHILGFDTGDAVLNEAAQILRLLHIEELRELQTKINEAIVAVQAIIADPKTDHRLGKVGR

SEQ ID NO: 197 - protein, 92 aa, Homo sapiens
  SITE (88): Xaa equals any of the naturally occurring L-amino acids
AVGMSFDPNLLHNNGHNGYLMVLQQHCVETGVIEKLLTSYGFIQCSERQARLFFHCSQYNGNLQDLKVGGNLSVLLCKNVITKFVLHXNLFM

SEQ ID NO: 198 - protein, 178 aa, Homo sapiens
  SITE (37): Xaa equals any of the naturally occurring L-amino acids
  SITE (102): Xaa equals any of the naturally occurring L-amino acids
  SITE (114): Xaa equals any of the naturally occurring L-amino acids
  SITE (154): Xaa equals any of the naturally occurring L-amino acids
  SITE (173): Xaa equals any of the naturally occurring L-amino acids
ARAGPVFKGVCKQFSRSQGHGFITPENGSEDIFVHVXDIEGEYVPVEGDEVTYKMCPIPPKNQKFQAVEVVLTQLAPHTPHETCLARSWAPRLSGSQASWRXVGEPHRVNGQQXAPCPTALADESFGGLSVHVCLSVCACGYERVPPPTPRPVXTVQAGQEVGGGQGTRPGFXLSTCL

SEQ ID NO: 199 - protein, 195 aa, Homo sapiens
  SITE (111): Xaa equals any of the naturally occurring L-amino acids
  SITE (112): Xaa equals any of the naturally occurring L-amino acids
  SITE (115): Xaa equals any of the naturally occurring L-amino acids
  SITE (117): Xaa equals any of the naturally occurring L-amino acids
  SITE (118): Xaa equals any of the naturally occurring L-amino acids
SSTRWRRSGPRREEDMEYYLVKWKGWPDSTNTWEPLQNLKCPLLLQQFSNDKHNYLSQVKKGKAITPKDNNKTLKPAIAEYIVKKAKQRIALQRWQDELNRRKNHKGMIFXXNTXDXXGPPSDFYYINEYKPAPGISLVNEATFGCHAQIASFKNGVLLKLEFFWLIIKTNKLKSHLVLPSMNATQGVSVVLIVQ

SEQ ID NO: 200 - protein, 149 aa, Homo sapiens
  SITE (109): Xaa equals any of the naturally occurring L-amino acids
  SITE (113): Xaa equals any of the naturally occurring L-amino acids
  SITE (114): Xaa equals any of the naturally occurring L-amino acids
  SITE (129): Xaa equals any of the naturally occurring L-amino acids
  SITE (137): Xaa equals any of the naturally occurring L-amino acids
  SITE (140): Xaa equals any of the naturally occurring L-amino acids
  SITE (142): Xaa equals any of the naturally occurring L-amino acids
  SITE (149): Xaa equals any of the naturally occurring L-amino acids
PPLPPCAFRVSQAPPRFVLKHSSSWRVPFKLFKVKMNTNSKEVLSLGVQVPEAWEELLTMKVEAKSHLQWQESRLKRSNPLAREIFRRHFRQLCYQETPGTKGGSYSTXGNFXXQWFEATCEHKGADLXLLVLGAVXYSXLXPRELQGX

SEQ ID NO: 201 - protein, 196 aa, Homo sapiens
  SITE (29): Xaa equals any of the naturally occurring L-amino acids
  SITE (160): Xaa equals any of the naturally occurring L-amino acids
VGGEDGNATMAETLPGSGDSGPGTASLGXGRCGDWDEAAQRAAGDRSAGGLKKRNLDTGGNKSVLMERLKKAVKEEGQDPDEIGIELEATSKKSAKRCVKGLKMEEEGTEDNGLEDDSRDGQEDMEASLENLQNMGMMDMSVLDETEVANSSAPDFGEDXTDGLLDSFCDSKEYVAAQLRQLPASAPRACCWMGKI

SEQ ID NO: 202 - protein, 108 aa, Homo sapiens
  SITE (25): Xaa equals any of the naturally occurring L-amino acids
QGIRMTDSLLKVTIWLTFKFCSFSXLQRSRRCLSSSCCFSRYCFMKLFWLISSPIWEFGWNAAWGVECFCKFSSIRAPLSRLTRALFCPLLARPRCSSAAFRSVTRSA

SEQ ID NO: 203 - protein, 147 aa, Homo sapiens
  SITE (98): Xaa equals any of the naturally occurring L-amino acids
  SITE (106): Xaa equals any of the naturally occurring L-amino acids
  SITE (132): Xaa equals any of the naturally occurring L-amino acids
RIYYGQCDAATARGAPAFTGDWTLPKSGCLSLFDALAGLSTSTLFPRITRSLPAPGNCPVFFALNLSFCAVVFKPHRINCRDFTFKIKLKEKKILCGXAMLDKIDXKLLALLQQDCTLSLQALAEAVNLTTXPCWKRLKRLEDDGIL

SEQ ID NO: 204 - protein, 144 aa, Homo sapiens
  SITE (29): Xaa equals any of the naturally occurring L-amino acids
  SITE (74): Xaa equals any of the naturally occurring L-amino acids
  SITE (143): Xaa equals any of the naturally occurring L-amino acids
SRMMMVDLKVAAYLDPQIRALWETKGPAXESSGQSKKSPQMDCLDPKSSCWHFRNFTYDEAGGPREAVSKLQEXCHLWLKPEIHSKEQILELLVLEQFLTILPRETQTQMQKHHPQSIEEAVALVEHLQKESGQTWNGVEKKXS

SEQ ID NO: 205 - protein, 148 aa, Homo sapiens
  SITE (54): Xaa equals any of the naturally occurring L-amino acids
  SITE (141): Xaa equals any of the naturally occurring L-amino acids
  SITE (142): Xaa equals any of the naturally occurring L-amino acids
QRPLPVGSCHGDAVGHRRSSNDGRDWCRILLISGRPVEKGRHWPQIPDLVPSMXPAVLGSPDRAPPEDEGPVMVKLEDSEEEGEAALWDPGPEAARLRFRCFRYEEATGPKRPGPSSESCVASGCVQRYAPRSRCWSCWCXXVWAHCP

SEQ ID NO: 206 - protein, 210 aa, Homo sapiens
  SITE (120): Xaa equals any of the naturally occurring L-amino acids
  SITE (124): Xaa equals any of the naturally occurring L-amino acids
  SITE (162): Xaa equals any of the naturally occurring L-amino acids
  SITE (169): Xaa equals any of the naturally occurring L-amino acids
  SITE (181): Xaa equals any of the naturally occurring L-amino acids
  SITE (196): Xaa equals any of the naturally occurring L-amino acids
TCEPSALLTPPMSSSSRGPGAGARRRRTRCRRCRACVRTECGDCHFCRDMKKFGGPGRMKQSCLLRQCTAPVLPHTAVCLLCGEAGKEDTVEGEEEKFGLSLMECTICNEIVHPGCLKMXKAEXVINAEIPNCWECPRCTQEGRTSKDSGEGPGRRRPTTAXRAPLGEXMEADRGATASTXPAQAQGPLLPGPPRXTAWAPQTKRKGSKE

SEQ ID NO: 207 - protein, 169 aa, Homo sapiens
  SITE (148): Xaa equals any of the naturally occurring L-amino acids
MMTAESREATGLSPQAAQEKDGIVIVKVEEEDEEDHMWGQDSTLQDTPPPDPEIFRQRFRRFCYQNTFGPREALSRLKELCHQWLRPEINTKEQILELLVLEQFLSILPKELQVWLQEYRPDSGEEAVTLLEDLELDLSGQQVPGQVXGPEMLARGMVPLDPVQGVLEL

SEQ ID NO: 208 - protein, 103 aa, Homo sapiens
  SITE (13): Xaa equals any of the naturally occurring L-amino acids
  SITE (91): Xaa equals any of the naturally occurring L-amino acids
RARVSAAVSDTAXLVCTSSAEGSYQLESCKGPSRGRSQICFVSGWVEERFLVLSGEARLFVSIARVREATWGHMLLSILQLTGPGGSIGAXPRIAPLTALTPG

SEQ ID NO: 209 - protein, 148 aa, Homo sapiens
VACSSGWVAHFLAAPGLRGKKRLLTLLLKHRTSCTELFAKLFQPRMAVESGVISTLIPQDPPEQELILVKVEDNFSWDEKFKQNGSTQSCQELFRQQFRKFCYQETPGPREALSRLQELCYQWANARVAHKGADLRTAGTGAVPEHSA

SEQ ID NO: 210 - protein, 216 aa, Homo sapiens
TQRSQRLSLPAAAGASLVQTHAEHTATGQRVTPGAGVMAATEPILAATGSPAAVPPEKLEGAGSSSAPERNCVGSSLPEASPPAPEPSSPNAAVPEAIPTPRAAASAALELPLGPAPVSVAPQAEAEARSTPGPAGSRLGPETFRQRFRQFRYQDAAGPREAFRQLRELSRQWLRPDIRTKEQIVEMLVQEQLLAILPEAARARRIRRRTDVRITG

SEQ ID NO: 211 - protein, 136 aa, Homo sapiens
AIIQQPGPYFSHPAIRYHPQETLKEFVQLVCPDAGQQAGQVGFLNPNGSSQGKVHNPFLPTPMLPPPPPPPMARPVPLPVPDTKPPTTSTEGGAASPTSPTYSTPSTSPANRFVSVGPRDPSFVNIPQQTQSWYLG

SEQ ID NO: 212 - protein, 130 aa, Homo sapiens
  SITE (8): Xaa equals any of the naturally occurring L-amino acids
  SITE (122): Xaa equals any of the naturally occurring L-amino acids
LGAGPRLXPSLAKARDSQFSESDAALQEELSSPETARQLFRQFRYQVMSGPHETLKQLRKLCFQWLQPEVHTKEQILEILMLEQFLTILPGEIQMWVRKQCPGSGEEAVTLVESLKGDPRDXGNGSVSRF

SEQ ID NO: 213 - protein, 157 aa, Homo sapiens
VIAPGLWMMAADIPRVTTPLSSLVQVPQEEDRQEEEVTTMILEDDSWVQEAVLQEDGPESEPFPQSAGKGGPQEEVTRGPQGALGRLRELCRRWLRPEVHTKEQMLTMLPKEIQAWLQEHRPESSEEAAALVEDLTQTLQDSAVAVFASLPVEVTSL

SEQ ID NO: 214 - protein, 277 aa, Homo sapiens
  SITE (6): Xaa equals any of the naturally occurring L-amino acids
  SITE (7): Xaa equals any of the naturally occurring L-amino acids
  SITE (8): Xaa equals any of the naturally occurring L-amino acids
  SITE (254): Xaa equals any of the naturally occurring L-amino acids
  SITE (261): Xaa equals any of the naturally occurring L-amino acids
  SITE (268): Xaa equals any of the naturally occurring L-amino acids
  SITE (275): Xaa equals any of the naturally occurring L-amino acids
  SITE (277): Xaa equals any of the naturally occurring L-amino acids
RVRAGXXXPMCSGRFQNIQVNPDFPRGRISNSFRRTSSTENKTKTLGKLHQEPRQLQSDGKRKILLEELANSDPKLALTGVPIVQWPKRDKLKFPTRPKVRVPTIPITKPHTMKPAPRLTPVRPAAASPIVSGARRRRVRCRKCKACVQGECGVCHYCRDMKKFGGPGRMKQSCVLRQCLAPRLPHSVTCSLCGEVDQNEETQDFEKKLMECCICNEIVHPGCLQMDGEGLLNEELPNCWECPKCYQEDSSEKXQKRKMEXSDQKNLXKAKVLAXLX

SEQ ID NO: 215 - protein, 204 aa, Homo sapiens
  SITE (2): Xaa equals any of the naturally occurring L-amino acids
  SITE (13): Xaa equals any of the naturally occurring L-amino acids
  SITE (36): Xaa equals any of the naturally occurring L-amino acids
  SITE (89): Xaa equals any of the naturally occurring L-amino acids
  SITE (98): Xaa equals any of the naturally occurring L-amino acids
  SITE (111): Xaa equals any of the naturally occurring L-amino acids
CXGRLLTLTPPLXRFLPFLVVPVHLLLLEQGAGRLXAYLKPGPRFCFPVLPAWLHFGHSQQFGSSSLTTPSDSLILRHPGWMISLQMEXSMSMRLNLXSSSSTVSSFPASXHTRHTAVWGSTGAMHCRMMQLCFMRPGPPNFFMSLQKWHSPHSVRRQASHLRHRVRRRRAPAVVRLAANFTAEAGPSFPLGRPTARFWSGSDS

SEQ ID NO: 216 - protein, 134 aa, Homo sapiens
AFIPAMAELIQKKLQGEVEKYQQLQKDLSKSMSGRQKLEAQLTENNIVKEELALLDGSNVVFKLLGPVLVKQELGEARATVGKRLDYITAEIKRYESQLRDLERQSEQQRETLAQLQQEFQRAQAAKAGAPGKA

SEQ ID NO: 217 - protein, 264 aa, Homo sapiens
  SITE (118): Xaa equals any of the naturally occurring L-amino acids
AKRPEPPSTSTLKQVTKVDCPVCGVNIPESHINKHLDSCLSREEKKESLRSSVHKRKPLPKTVYNLLSDRDLKKKLKEHGLSIQGNKQQLIKRHQEFVHMYNAQCDALHPKSAAEIVXEIENIEKTRMRLEASKLNESVMVFTKDQTEKEIDEIHSKYRQEDNMTSVTNHFSQSKLDSPEELEPDREEDSSSCIDIQEVLSSSESDSCNSSSSDIIRDLLEEEEAWEASHKNDLQDTEISPRQNRRTRAAESAEIEPRNKRNRN

SEQ ID NO: 218 - protein, 228 aa, Homo sapiens
ASGQSGGGYAGSGVRGNKMATETVELHKLKLAELKQECLARGLETKGIKQDLIHRLQAYLEEHAEEEANEEDVLGDETEEEETKPIELPVKEEEPPEKTVDVAAEKKVVKITSEIPQTERMQKRAERFNVPVSLESKKAARAARFGISSVPTKGLSSDNKPMVNLDKLKERAQRFGLNVSSISRKSEDDEKLKKRKERFGIVTSSAGTGTTEDTEAKKRKRAERFGIA

SEQ ID NO: 219 - protein, 201 aa, Homo sapiens
  SITE (122): Xaa equals any of the naturally occurring L-amino acids
GRIEYLVKWKGWAIKYSTWEPEENILDSRLIAAFEQKERERELYGPKKRGPKPKTFLLKARAQAEALRISDVHFSVKPSASASSPKLHSSAACTGSRRTSAAAPYVPPSPAPPARRGAAPDXARHFALLGDGAHHQPQGEAAGAQAEPHHPEPEGDRQGRWRRGRGQGAGALARPKVPSRNRFIGKSKKFSETSCVHRSAT

SEQ ID NO: 220 - protein, 283 aa, Homo sapiens
  SITE (158): Xaa equals any of the naturally occurring L-amino acids
  SITE (252): Xaa equals any of the naturally occurring L-amino acids
  SITE (265): Xaa equals any of the naturally occurring L-amino acids
RRTQLKQSVGRPAPAPAPTLPLPPATPPPTMASEELYEVERIVDKRKNKKGKTEYLVRWKGYDSEDDTWEPEQHLVNCEEYIHDFNRRHTEKQKESTLTRTNRTSPNNARKQISRSTNSNFSKTSPKALVIGKDHESKNSQLFAASQKFRKNTAPSLXSRKNMDLAKSGIKILVPKSPVKSRTAVDGFQSESPEKLDPVEQGQEDTVAPEVAAEKPVGALLGPGAERARMGSRPRIHPLVPQVPGPVTAAMXTGLAVNGKGTSPXMDALTANGTTNIRHLVQE

SEQ ID NO: 221 - protein, 253 aa, Homo sapiens
  SITE (130): Xaa equals any of the naturally occurring L-amino acids
RNDTKEDVFVHQTAIKRNNPRKFLRSVGDGETVEFDVVEGEKGAEATNVTGPGGVPVKGSRYAPNRRKSRRFIPRPPSVAPPPMVAEIPSAGTGPGSKGERAEDSGQRPRRWCPPPFFYRRRFVRGPRPXNQQQPIEGTDRVEPKETAPLEGHQQQGDERVPPPRFRPRYRRPFRPRPRQQPTTEGGDGETKPSQGPADGSRPEPQRPRNRPYFQRRRQQAPGPQQAPGPRQPAAPETSAPVNSGDPTTTILE

SEQ ID NO: 222 - protein, 118 aa, Homo sapiens
RTLDATGERSQSYAVLALQTYGHRTGDKECPFFIKGNQKLEQFRVAHEDPMYDIIRDNKRHEKDVRIQQLKQLLEDSTSDEDRSSSSSSEGKEKHKQKKKKKKKKKKKKKKKKKKKRG

SEQ ID NO: 223 - protein, 58 aa, Homo sapiens
TYLECEHNSLVNSKCLTVVLSRCISVCLNKFYFVCKKKKKKKKKKKKKKKKKKKKKKK

SEQ ID NO: 224 - protein, 66 aa, Homo sapiens
ALVDFGPQTKSKGSGPPCQRLPPCSHVGNPWNKMLVQCEKKKKKKKKKKKKKKKKKKKKKKKKKKK

SEQ ID NO: 225 - protein, 150 aa, Homo sapiens
  SITE (143): Xaa equals any of the naturally occurring L-amino acids
  SITE (144): Xaa equals any of the naturally occurring L-amino acids
RAVRTCACTSLMWSGRPRLLSTSCRATVHLCLMSASTATRAYWPPVTPAAWSSSGGGSRSRVLSALLLSSIPPLLLQPRVVNKVSVVMLRAGSQLCRGRTGQRAAGSSRNTVKKKKKKKKKKKKKKKKKKKKKKKKKKKKKKXXAVLKDP

SEQ ID NO: 226 - protein, 156 aa, Homo sapiens
  SITE (12): Xaa equals any of the naturally occurring L-amino acids
  SITE (136): Xaa equals any of the naturally occurring L-amino acids
DRSETLCLSHSXLAAVWSGHHEGVQMCCVLRASQVPSLTAWPLPSSLKDRPLSSRLWTGGRTTGLREPLVARGFPQLSAKENCALRRQSQEVSPDFCKILLNKTTWIKKKKKKKKKKKKKKKKKKKKKKKKKKRGXGSTRPRIRTGTCRRTLYSVT

SEQ ID NO: 227 - protein, 40 aa, Homo sapiens
RWSMNFLEMLNKLPGSLKKKKKKKKKKKKKKKKKKKKKKK

SEQ ID NO: 228 - protein, 49 aa, Homo sapiens
  SITE (38): Xaa equals any of the naturally occurring L-amino acids
  SITE (39): Xaa equals any of the naturally occurring L-amino acids
KSLMTQYIYIASLYNSEIKIDSAKKKKKKKKKKKKKKXXKKKKKKKKKK

SEQ ID NO: 229 - protein, 98 aa, Homo sapiens
PQVLGRVRQENRLILGGGGCSELRLCHCTLAWATRVKLHLKKEKQNKQTKNTKKKKKKKKKKKKKKKKKKKKKKKKKKKKKKKKKKKGGRSRGSLEGP

SEQ ID NO: 230 - protein, 78 aa, Homo sapiens
DGISLCRSGWNAVAQSWLTATSASPVQVILLPQPGLHEETLSASNTKISRAWWGMPVTPGTWEGEAGESLDPGWWRLQ

SEQ ID NO: 231 - protein, 111 aa, Homo sapiens
VGRCSQRQDLWLCERVEAGFSSHLPFVVTCLVKCTFWAVVHVLLSGCHPRYLFGDRFLLVLLPSSNSPSHDLEFHILKKKKKKKKKKKKKKKKKKKKKKKKKKKKKKKKKK

SEQ ID NO: 232 - protein, 111 aa, Homo sapiens; identical to SEQ ID NO: 231

SEQ ID NO: 233 - protein, 53 aa, Homo sapiens
  SITE (50): Xaa equals any of the naturally occurring L-amino acids
  SITE (53): Xaa equals any of the naturally occurring L-amino acids
IRLSIAKRYFKPKKKKKKKKKKKKKKKKKKKKKKKKKKKKKKKKKKKKKXEGX

SEQ ID NO: 234 - protein, 39 aa, Homo sapiens
  SITE (3): Xaa equals any of the naturally occurring L-amino acids
  SITE (27): Xaa equals any of the naturally occurring L-amino acids
  SITE (33): Xaa equals any of the naturally occurring L-amino acids
VRXSRVDPRVATLHEFGMEGQVSITFXQVLCEXTQFLLW

SEQ ID NO: 235 - protein, 80 aa, Homo sapiens
  SITE (76): Xaa equals any of the naturally occurring L-amino acids
  SITE (77): Xaa equals any of the naturally occurring L-amino acids
FYSWNLIFQHKVHSVFRNPSWCHTFHFDVNFSLLSFVLRLHFAINVLTVKKKKKKKKKKKKKKKKKKKKKKKKKKXXKKK

SEQ ID NO: 236 - protein, 374 aa, Homo sapiens
SKMSGRSGKKKMSKLSRSARAGVIFPVGRLMRYLKKGTFKYRISVGAPVYMAAVIEYLAAEILELAGNAARDNKKARIAPRHILLAVANDEELNQLLKGVTIASGGVLPRIHPELLAKKRGTKGKSETILSPPPEKRGRKATSGKKGGKKSKAAKPRTSKKSKPKDSDKEGTSNSTSEDGPGDGFTILSSKSLVLGQKLSLTQSDISHIGSMRVEGIVHPTTAEIDLKEDIGKALEKAGGKEFLETVKELRKSQGPLEVAEAAVSQSSGLAAKFVIHCHIPQWGSDKCEEQLEETIKNCLSAAEDKKLKSVAFPPFPSGRNCFPKQTAAQVTLKAISAHFDDSSASSLKNVYFLLFDSESIGIYVQEMAKLDAK

SEQ ID NO: 237 - protein, 41 aa, Homo sapiens
  SITE (41): Xaa equals any of the naturally occurring L-amino acids
IKFYCFFKKKKKKKKKKKKKKKKKKKKKKKKKKKKKKKKGX

SEQ ID NO: 238 - protein, 63 aa, Homo sapiens
  SITE (62): Xaa equals any of the naturally occurring L-amino acids
FSARCFFLFVFNSIQSIQFLKHIKIICLLKKKKKKKKKKKKKKKKKKKKKKKKKKKKKKKKXG

SEQ ID NO: 239 - protein, 52 aa, Homo sapiens
  SITE (29): Xaa equals any of the naturally occurring L-amino acids
GSRVKCCIFISDVRTLKYLKKINYFIVVXKKKKKKKKKKKKKKKKKKKKKKK

SEQ ID NO: 240 - protein, 47 aa, Homo sapiens
  SITE (47): Xaa equals any of the naturally occurring L-amino acids
FICVFYYDLVLTIKILTTFKKKKKKKKKKKKKKKKKKKKKKKKKKKX

SEQ ID NO: 241 - protein, 84 aa, Homo sapiens
  SITE (82): Xaa equals any of the naturally occurring L-amino acids
GLTEHVETFFTFIGNKECLHLHILLLLDVKSCNYFCCYIKCHTFNKGKCTYEKKKKKKKKKKKKKKKKKKKKKKKKKKKKKXKK

SEQ ID NO: 242 - protein, 73 aa, Homo sapiens
WACLCLHLVLCLRSCDCTLLCPGTSVSLGFVINAAYLKKEKKKKKKKKKKKKKKKKKKKKKKKKKKKKKKKKK

SEQ ID NO: 243 - protein, 74 aa, Homo sapiens
  SITE (72): Xaa equals any of the naturally occurring L-amino acids
  SITE (73): Xaa equals any of the naturally occurring L-amino acids
LFHSTRNIICLLRLLIFIFLIFTRNNYFLKNKAEYLKANKDLRTFQKKKKKKKKKKKKKKKKKKKKKKKKKXXG

SEQ ID NO: 244 - protein, 54 aa, Homo sapiens
  SITE (6): Xaa equals any of the naturally occurring L-amino acids
  SITE (54): Xaa equals any of the naturally occurring L-amino acids
YFFLGXFLRNFFMKRQMHVEITSGIKIVFCFKKKKKKKKKKKKKKKKKKKKKKX

SEQ ID NO: 245 - protein, 74 aa, Homo sapiens
HLMICPLFTVSNTFNMCESCLPKQTRNSFLPYSHIFVPASHLTDKKKKKKKKKKKKKKKKKKKKKKKKKKKKKK

SEQ ID NO: 246 - protein, 42 aa, Homo sapiens
MKICLDLFSFISLGNLMIPNIFCLHFVGVQSPRYRYFMSFLS

SEQ ID NO: 247 - protein, 84 aa, Homo sapiens
  SITE (2): Xaa equals any of the naturally occurring L-amino acids
  SITE (83): Xaa equals any of the naturally occurring L-amino acids
VXKKKKKIPLVVQLYHRNCRNGPVFEQLQSFLPPSERKKYALSVCACFRKKVGPRCNAWNASKKKKKKKKKKKKKKKKKKKKXG

SEQ ID NO: 248 - protein, 31 aa, Homo sapiens
  SITE (31): Xaa equals any of the naturally occurring L-amino acids
LTELEKKKKKKKKKKKKKKKKKKKKKKKKKX

SEQ ID NO: 249 - protein, 57 aa, Homo sapiens
  SITE (54): Xaa equals any of the naturally occurring L-amino acids
PPKLAMATLLGPLPACGSFPFASFNKQLLLKKKKKKKKKKKKKKKKKKKKKKKXGGF

SEQ ID NO: 250 - protein, 37 aa, Homo sapiens
  SITE (37): Xaa equals any of the naturally occurring L-amino acids
FPYNLCKSYISPLTKKKKKKKKKKKKKKKKKKKKKKX

SEQ ID NO: 251 - protein, 196 aa, Homo sapiens
  SITE (40): Xaa equals any of the naturally occurring L-amino acids
  SITE (48): Xaa equals any of the naturally occurring L-amino acids
  SITE (142): Xaa equals any of the naturally occurring L-amino acids
  SITE (166): Xaa equals any of the naturally occurring L-amino acids
  SITE (196): Xaa equals any of the naturally occurring L-amino acids
TSLSHKATQLTHWASPFPLGQNLGGPSPSRQCLGLFCLSXSPRACSVXELCVPRSFHGWESLMLPLPSDAGLALLLQVCFSHSCGCRNLIYREEPVAAAAPATAALTVLTTHLGQPSLAGALVASHFPFPSLWLRGGVRGWXGRAAYHGLGLEEDEFVDLNKEFVXFEKKKKKKKKKKKKKKKKKKKKKKKKKKKX

SEQ ID NO: 252 - protein, 57 aa, Homo sapiens
  SITE (52): Xaa equals any of the naturally occurring L-amino acids
KKKVYANIPDIKRSMHQINFSFDKTFHKKKKKKKKKKKKKKKKKKKKKKKKXPGGGP

SEQ ID NO: 253 - protein, 66 aa, Homo sapiens
  SITE (65): Xaa equals any of the naturally occurring L-amino acids
KRNLIFEMGLRHVYKYGYYFYARVFSHLIKIFMVISVKKKKKKKKKKKKKKKKKKKKKKKKREKXK

SEQ ID NO: 254 - protein, 66 aa, Homo sapiens
  SITE (48): Xaa equals any of the naturally occurring L-amino acids
  SITE (63): Xaa equals any of the naturally occurring L-amino acids
IHHSWLTLLLMGFWIGSLFLTIVNKAALSIKKKKKKKKKKKKKKKKKXKKKKKKKKKKKKKKXGGP

SEQ ID NO: 255 - protein, 34 aa, Homo sapiens
SYPEPELLLKKKKKKKKKKKKKKKKKKKKKKKKK

SEQ ID NO: 256 - protein, 64 aa, Homo sapiens
  SITE (61): Xaa equals any of the naturally occurring L-amino acids
  SITE (63): Xaa equals any of the naturally occurring L-amino acids
NHSHMVNFLFCYGSLLLMGMQWVLLGNGQFLLKYFWKKKKKKKKKKKKKKKKKKKKKKKKXGXP

SEQ ID NO: 257 - protein, 76 aa, Homo sapiens
  SITE (64): Xaa equals any of the naturally occurring L-amino acids
  SITE (70): Xaa equals any of the naturally occurring L-amino acids
KYCLLIRAENPSFLTWLFFRPLGDKGPSPPSTPSRAKKKKKKKKKKKKKKKKKKKKKKKKKKKXKKIKRXQKLKKK

SEQ ID NO: 258 - protein, 45 aa, Homo sapiens
  SITE (45): Xaa equals any of the naturally occurring L-amino acids
MLILWYCKIKCAPKTQKKKKKKKKKKKKKKKKKKKKKKKKKKKKX

SEQ ID NO: 259 - protein, 87 aa, Homo sapiens
  SITE (35): Xaa equals any of the naturally occurring L-amino acids
  SITE (84): Xaa equals any of the naturally occurring L-amino acids
  SITE (87): Xaa equals any of the naturally occurring L-amino acids
INENPRQNFVSVQSLSPSFFAFKNLPVIKAKWSSXKKKKKKKKKKKKKKKKKKKKKKKKKKKKKKKKKKKKKKKKKKKKKKRGXPFX

SEQ ID NO: 260 - protein, 63 aa, Homo sapiens
KTCIFYFVADSLAASWQVAEMVELEKKKKKKKKKKKKKKKKKKKKKKKKKKKKKKKKKKGGPF

SEQ ID NO: 261 - protein, 58 aa, Homo sapiens
  SITE (4): Xaa equals any of the naturally occurring L-amino acids
  SITE (14): Xaa equals any of the naturally occurring L-amino acids
  SITE (49): Xaa equals any of the naturally occurring L-amino acids
LNTXHYRESWYACXLPVRKFPGRPTRPKKKKKKKKKKKKKKKKKKKKKXKKKKRGGGG

SEQ ID NO: 262 - protein, 74 aa, Homo sapiens; identical to SEQ ID NO: 190
  SITE (74): Xaa equals any of the naturally occurring L-amino acids

SEQ ID NO: 263 - protein, 97 aa, Homo sapiens
  SITE (95): Xaa equals any of the naturally occurring L-amino acids
  SITE (97): Xaa equals any of the naturally occurring L-amino acids
FLCLHSTALLPKVLDFLPRNSLKKGLSIVSTCCSVFHICVHSKNANKDCFLRGCSYKKKKKKKKKKKKKKKKKKKKKKKKKKKKKKKKKKKKKKXGX

SEQ ID NO: 264 - protein, 181 aa, Homo sapiens
  SITE (13): Xaa equals any of the naturally occurring L-amino acids
  SITE (18): Xaa equals any of the naturally occurring L-amino acids
  SITE (19): Xaa equals any of the naturally occurring L-amino acids
  SITE (29): Xaa equals any of the naturally occurring L-amino acids
  SITE (72): Xaa equals any of the naturally occurring L-amino acids
  SITE (75): Xaa equals any of the naturally occurring L-amino acids
  SITE (181): Xaa equals any of the naturally occurring L-amino acids
GAHGARHPNPNRXQRGPXXGPGVGGAYPXSRGPARGWAGMPGGPSQLLGSRPPGEAAPAKEATRGQCRLLPXPQXLPVLKALGTGPGKLLLSFELWLPPMGLSFRLSRSPQPDGPLTIPSALQSQPPRLTSASEPPLDELPPAPAPLKTRKPEKKKKKKKKKKKKKKKKKKKKKKKKKKKX

SEQ ID NO: 265 - protein, 55 aa, Homo sapiens
  SITE (47): Xaa equals any of the naturally occurring L-amino acids
  SITE (53): Xaa equals any of the naturally occurring L-amino acids
TFTVICNITAVKYLNKDDKKNKKKKKKKKKKKKKKKKKKKKKKKKKXGGRFKXSK

SEQ ID NO: 266 - protein, 67 aa, Homo sapiens
  SITE (61): Xaa equals any of the naturally occurring L-amino acids
TVRTPLNCYRLVSFEMTPKLKFGALKIKLNFTLQTRKKKKKKKKKKKKKKKKKKKKKKKKXGGRFKG

SEQ ID NO: 267 - DNA, 80 bp, Homo sapiens
aaaaaaaaaaaaaaaaaaaaaaaaaaaaaaaaaagaaaaaaaaaaaaaaaaaaagaaaacagaaaagaaaaaaaaaaatc

SEQ ID NO: 268 - DNA, 158 bp, Homo sapiens
tttttttattttttttttttagtttattttttttttttttttttattttttttttttttatttttttgttttttttttttttttttttttttttttttttttttttttttttttttttttttttttttttttttttttttttttttttttttttttta

SEQ ID NO: 269 - DNA, 126 bp, Homo sapiens
  SITE (9): n equals a,t,g, or c
  SITE (17): n equals a,t,g, or c
  SITE (19): n equals a,t,g, or c
  SITE (20): n equals a,t,g, or c
  SITE (32): n equals a,t,g, or c
  SITE (107): n equals a,t,g, or c
  SITE (113): n equals a,t,g, or c
  SITE (117): n equals a,t,g, or c
  SITE (118): n equals a,t,g, or c
ttttttttntttttttntnntttttttttttnttttttttttttttttttttttttttttttttttttttttttttttttttttttttttttttttttttttttttntttttntttnntttttggc

SEQ ID NO: 270 - DNA, 77 bp, Homo sapiens
aaaaaaaaaaaaaaaaaaaaaaaaaaaaaaaaaaaaaaaaaaaaaaaaaaaaaaaaaaaaaaaaaaaaaaaaaaaaa

SEQ ID NO: 271 - DNA, 143 bp, Homo sapiens
aagaaaagaaaaaaaaaaaaaaaaaaaaaaagaaaaaacaaaaaaaaaaaaaaaaaaaaaaaaaaaaaaataaaaaaaaaaaaaaaaaaaaagagaaacaaaaaaaaaaaaatagaaaaaaaaaaaaaaaaacaaaaaaggag

SEQ ID NO: 272 - DNA, 148 bp, Homo sapiens
  SITE (136): n equals a,t,g, or c
aaaaaaaaaaaaaaaaaaaaaaaaaaaaaaaaaaaaaaaaaaaaaaaaaaaaaaaaaaaaaaaaaaaaaaaaaaaaaaaaaaaaaaaaaaaaaaaaaaaaaaaaaaaaaaaaaaaaaaaaaaaaaaaaaaaaaaanaaaaaaaaaaaa

SEQ ID NO: 273 - DNA, 116 bp, Homo sapiens
aaaaaaaataaaaaaaaaaaaaaaaataaaaaaaaaaaaaaaaaacaaaaaaaaaaaaaaaaaaaaaaaaaaaaaaaaaaacaacacaaaaaaaaaaaaaaaccaaaaacaaacag

SEQ ID NO: 274 - DNA, 96 bp, Homo sapiens
attttttttttttattttttttttaattttgtttgttttttttttttttttttaatttttttttttttttttttttttttttttttttttttcggg

SEQ ID NO: 275 - DNA, 158 bp, Homo sapiens; identical to SEQ ID NO: 268

SEQ ID NO: 276 - DNA, 126 bp, Homo sapiens; identical to SEQ ID NO: 269
  SITE (9): n equals a,t,g, or c
  SITE (17): n equals a,t,g, or c
  SITE (19): n equals a,t,g, or c
  SITE (20): n equals a,t,g, or c
  SITE (32): n equals a,t,g, or c
  SITE (107): n equals a,t,g, or c
  SITE (113): n equals a,t,g, or c
  SITE (117): n equals a,t,g, or c
  SITE (118): n equals a,t,g, or c

SEQ ID NO: 277 - DNA, 151 bp, Homo sapiens
tttttttttttttttttatttatttctttatttttatttttttctcttttttttttatttatttttttttttttttttttttttgttttttttgttttttttttttttttttttttttttttttttttttctttttttttttttttttttt

SEQ ID NO: 278 - DNA, 152 bp, Homo sapiens
ctctttaattttttttttttttttttttttatattttttttttttttttttgtttttttttttttttttttttttttttttttttttttttttttttttatattttttttttgttttattttttttttttttttttttttttttattttttt

SEQ ID NO: 279 - DNA, 130 bp, Homo sapiens
tctttttatttttttttgtctttcttgtttttttttttttttttttatttttttttttttattttttcttttttttttttttttttttttttttttttttttttttctttttgttttttttttttttttt

SEQ ID NO: 280 - DNA, 202 bp, Homo sapiens
ttttttttttgttttattttttttttgtttattttttttttttttttttttttttttttttttttgtttttttgtttttttttatttttttttttatttttttttttttctttttttttttattttttgttttttttttttttttttttttttttttttttttttttttttttttatttttttttttttttttctttttttt

SEQ ID NO: 281 - DNA, 118 bp, Homo sapiens
tatttatagtcagttattattaaacagtacctttcgtgctattggctcttgaccttccatcaatgtgtaccagctgacaagtttattccaaccttcagttggcaacagtatgtaatcc

SEQ ID NO: 282 - DNA, 77 bp, Homo sapiens
tttttttttttttttatttttttttttttttttttttttttttttttttttttttttttttttttttttttttattt

SEQ ID NO: 283 - DNA, 3364 bp, Homo sapiens
taccagtttttaaacttttaatgttctgaagtataagtaaacacatctcaacagctttacatattttcatatattttattttttaaactctcataactttgcaagctagcagtaaaatattgccttcaatattttactaattagcaccgtataccttttaaagctaactggaacattgattcattataaatgattgtaaaataaaatgatcatttcaaatgccaaattaatctcaaataacaagtgaactattattaattttatctctttttttggctctacgcacaaagatgtatttcaaagatgaacttaattatattagtatcagttttgtcaatctagcaaatcaaagtatcacagtttaaagcaatatttaatctctgaaattactagaggcatacaagaaagttaaggaatcagctacaaaaacaaaagatactacataactgatttatagtcccttattttttaaaagaatgaggaaataactcaatgaaaaattccatggtgccaagtatcagttacacatatggttaagtatacgtcagtattctctgttttgcttatcagagtttggccttaccaaaaaccatcgaaatgtccaggataactcacagggacagctggaagcctgaaataaaattgctcagtgcaaaaagatcccaaaccattcatataattttaaatggaagcctagacatttaatccctatttttaatgttcacatctgaaaaatctttcaaaaatatggaaaaaatctaattatactaaaattacttccacacattcaaaaaaaatttttaagggatattttctttcctgttttctgctaaaagcattcctctgagctatggggttaagttctgagccacgactgactgcttactagcatgcctgttttgcataccagtagaatcaagtccagttttgccatttgtggataactatgacaagatacaaaagcatgtgtttgccataaatagccctggctaacagcaaaccgctcacactgagcagatcaaattctctataaggagcacagtctggaccatagccaaatcccactactaatgtttaagactgctattatcaattcctattccaattcaatttgcaaaatatattcagaaatagtaggtgaaatgactgttccgaaacatcagaagtatcattaaacttttaaaggacattttacaaattattttcattacgaccaaataagcaataagagcttcctgcttctactatacaactacttagaaatgtaaatgtgaataaaaaaataactatgctaatttatccagagaacaaatcagatattgaaaagtatttatgccaaagtgcaaaaaataatttctgatcttcatattaacacataggaaataaatacactaatgtttataaaagtaccattctttaacaatggtattttatattagttggccttaagatagaatactttttaaaccaaatagatccaacaaatctggaaaatatcacacatgaatgctgtacaaaaaaaattctcaaatgaccagtgcagagattagtaatagctgtttttaccctagaagttgtttcacataacattttgcaaaatttccaaggaaaacaaggcaacgttctgtaatatgccacaatttttattgcaacgtggccatttttgtgagggtggggagtttgatctcaaaacaatgttccatttaaggctcttttatacagaaattgccatcatgactgatattcaaaatatctttagtgttgcaggactcacatggtaaacataaaactcctacacttattcagtagtgtacactcaatggaaaacaaaaaggcattaataacagctatttcttttaagaagatatgcaggtaacaggaatgaacactgaggtactaggataagttgatgacacagttaacaaaacttaattggcattccttttaggatattaaacttattacaaaaagtgcttttaatgcatagtgttatatccgtgctgccatatcactaaaataggcttgccaaggcaggtgaggtgtatgaatgctcaagcctcacagaactgcaatcaagtgccaactataaataatactgaaaaaagttgaccatctgaccagtggataatactttcaaggcattcaattagcttatcctttgcagtattctaagctattcacattgacgatcacatacattgtagtgcttgctgcaagggaggcatataaccagttgttttggctaaaatatgacaggaaggcattccttgggttctatataaaagtaacagtattcaacagtctaatggcaatcactgataggctgcttaaataaatgatatttccttcattcattgtgttggaagggcccagtggaaagggggaaatacaacaaaaaaccaaaacctaatactattccaatggactgagctggagaaatggaagctccttaagatccagatggcacttgactgtcattttataatggttttccttcaagtgaaactactacattgcctcccaatttctctccaagtgtcgaacggtccttaatatcatccaagccatttacttgccactcatgtttaatacctaaaaagaaaaaacattatcctattactttattataattaataaagaataatttctctgccccaaatattcaagtttgtacctgtaaatttctttttaatggcatctttagagctagcataaatcatcttgctttttaaaggtgcactttcaggagccctacagaaaaaaaaaaaattattgaatcccatttataagaaaaacaaaggtaagactgactatgataataataatccttgcattttaaaagtacttttttcttttgtttttacacaccagaatataaatactaggtcttctttcttagactcttttgtttcgtatgtggcatcgtacaaagcatatcggcaatcattcagaggtagcaacttaacaaaagatgtgtaggggtcctctacagtatcacaaatgtcacccaccaagatctgctttgcttcctctacaattatttgtcttttgtcatcgcttaaacagaagagaactgctttctttctctttttgatctcctcttgtgtagaagatttcctaactttaatatcattaaaaactttgataacttcataattaactgtaactccagaagcctgaaaataaaaaaagaacagtaattcagaaaacgtattttggttttaaccaaaattactgtttgcctagagaaaactaactttagtctggacatcaaaaattgcaccgtaccatgtaagtcgtcaaataagatttgtaacattttaagactcagtagacgatacagcgaagagtctcactcatcctg

SEQ ID NO: 284 - DNA, 455 bp, Homo sapiens
atgaatagtttaaacagattattgcatttacatagcattttcctgttttcaaaaaccatttccatatttagtactcaggaaacatggtaaacagatattaccgttcccatactatgggttaaaaaactgagatttagagatttaatttgccaaattgcattatgagaggaaatttaagtggagggatgattcctctacttctacatggaaataaagcaattagttggatgttccagagcaaaagaaaagcctcagacttctttatgggctgaaaggagacagaacatccataaactcatgctgtcttcaaaagcagtatttgagcttttgaagtggtggctcatgcatgcaatcctagcacttttgggaggcggaggtcagaggacagcttgagcccaggagttggagatcagcctaggcaacatggccaaactcagtctctacaaaagagatac

SEQ ID NO: 285 - DNA, 148 bp, Homo sapiens; identical to SEQ ID NO: 272
  SITE (136): n equals a,t,g, or c

SEQ ID NO: 286 - DNA, 158 bp, Homo sapiens; identical to SEQ ID NO: 268

SEQ ID NO: 287 - DNA, 126 bp, Homo sapiens; identical to SEQ ID NO: 269
  SITE (9): n equals a,t,g, or c
  SITE (17): n equals a,t,g, or c
  SITE (19): n equals a,t,g, or c
  SITE (20): n equals a,t,g, or c
  SITE (32): n equals a,t,g, or c
  SITE (107): n equals a,t,g, or c
  SITE (113): n equals a,t,g, or c
  SITE (117): n equals a,t,g, or c
  SITE (118): n equals a,t,g, or c

SEQ ID NO: 288 - DNA, 1193 bp, Homo sapiens
cttacacatactgttcagcagcttatcccctcccctctaacagatcatgaacatttttccatgtctgtatgacatggtatttcattttactgttgtatcatcatttatcttgccagtcaccagttttcatacatttaagttgtcaaaggttttgctataacaaataaagaaacaacatcctcatatatagatttttgtttattcagtgttactaggtcaaagaatgtaaacatttaaaatgtttaagagattattatgccaaattatcttctaaaaggctatatcaattaaaattctcaccagccgtacatgaggatgaaatgaccctatatttaagaagaattagtgaaatcctattgttctaaaattgagcaagactctgggcaactagtagtgaatttatatgaaaagctagatccattcttctccctcgtgggcctgtgagttcatttcatagaaatcctttcttctttgggggaagctattggttgaagaatagttaacatctttattcaggctattcccagatctcttctgaaatctgtaggtccttggtgctggctccgtctcaggtgagtttttcttcattaagtgcactactcatgtgaacataatactacagagaattgccttctctgtgatagtgtttgtgctttggagtacatgtatcaaattcatctgtgaaggaacctgggaaatattatgaatttagtcataatatttataagtaacttatgtttgtaagtaatgtttataagtaaccaatttttaaaaacagtttttaaggccaatatatttgatgttgttactgctattaaatcaaggttatcagggctgggtagggtagctcatgcctataatcccagcactgcgggaggatcgcttgaggctgggagtttgagaatagtctggacaacatagcaagatcgtgtctctacaaaatattaaaaagatatccggggctgggcacagtggctcacgcttataatcctaacactttgggaggccaaggcaaacagatgagttgaaatcaggagttcgagaccagcctggccaacatggtgaaaccctgtttctactaaaaatacagaaattacacctgttatcccagctactcaggaggttgaggcaggagaatcacttgaacccaggaggtagaggttgcagtgagccaagattgtgccactacattt

SEQ ID NO: 289 - DNA, 1268 bp, Homo sapiens
cttacacatactgttcagcagcttatcccctcccctctaacagatcatgaacatttttccatgtctgtatgacatggtatttcattttactgttgtatcatcatttatcttgccagtcaccagttttcaaacatttaagttgtcaaaggttttgctataacaaataaagaaacaacatcctcatatatagatttttgtttattcagtgttactaggtcaaagaatgtaaacatttaaaatgtttaagagattattatgccaaattatcttctaaaaggctataccaattaaaattctcaccagccgtacatgaggatgaaatgaccctatatttaagaagaattagtgaaatcctattgttctaaaattgagcaagactctgggcaactagtagtgaatttatatgaaaagctagatccattcttctccctcgtgggcctgtgagttcatttcatagaaatcctttcttctttgggggaagctattggttgaagaatagttaacatctttattcaggctattcccagatctcttctgaaatctgtaggtccttggtgctggctccgtctcaggtgagtttttcttcattaagtgcactactcatgtgaacataatactacagagaattgccttctctgtgatagtgtttgtgctttggagtacatgtatcaaattcatctgtgaaggaacctgggaaatattatgaatttagtcataatatttataagtaacttatgtttgtaagtaatgtttataagtaaccaatttttaaaaacagtttttaaggccaatatatttgatgttgttactgctattaaatcaaggttatcagggctgggtagggtagctcatgcctataatcccagcactgcgggaggatcgcttgaggctgggagtttgagaatagtctggacaacatagcaagatcgtgtctctacaaaatattaaaaagatatccggggctgggcacagtggctcacgcttataatcctaacactttgggaggccaaggcaaacagatgagttgaaatcaggagttcgagaccagcctggccaacatggtgaaaccctgtttctactaaaaatacagaaattacacctgttatcccagctactcaggaggttgaggcaggagaatcacttgaacccaggaggtagaggttgcagtgagccaagattgtgccactacatttcagacctgggcaacagagtgagaccctgtctcaaaaaaaaaaaaaaaaaaaaaaaaaaaaagaagccagatataa

SEQ ID NO: 290 - DNA, 303 bp, Homo sapiens
gcccccatgcccagcctttcattctctcttaccatggattccttttgtttttcttttatggacttattttttttcccccttcttttctttttgcccttggtacagtaactctgtttcttcttcgtaaatgttctcattttctctttaggtttgttatgcaatgatgattcccatttctttattactagctcatatttctccttcaagagtcagactaatctgccaagttactggaaagttctgcctgggtgaaccagcagcacctcaaaaatagcatttccaaaactgaacccagcattattt

SEQ ID NO: 291 - DNA, 303 bp, Homo sapiens; identical to SEQ ID NO: 290

SEQ ID NO: 292 - DNA, 603 bp, Homo sapiens
agatcacgtgaccagcctgaaccaatcactgtgcctgtggagacacggtggctctgattggcctggcttatatgtgttgcttggatctagaggtaggataaagcccactcaggccacatggacagaaagaaggaagagagagagggctgaaggcaggggcaaggcaaatgggtgctgtgtagagacaggcaaacccagcagatgccctgagcctagacctctggtatgctgaatgctggaagccattgggtttacttatatatatttcacggtgctgagaaacatctgtttgcattatttatttgtgaatcattcctaatataaattgtgttgctgttttaaatttcctatgaaatacgtttttaagtatcacgatattgcgtagtcaaatgtaatattgtttttgcacatggttctgtatacatcatagattctaaattaaaacttttgatagaaattacaaaatttgtgttaccttactgtatgggcatatttaaaagctaacatcctagtttctggagattctgatctaccaatatttcccatgctgaatcataagcttcagcatttctttaacaatatctcggcgtttggtataaaacc

SEQ ID NO: 293 - DNA, 117 bp, Homo sapiens
  SITE (2): n equals a,t,g, or c
  SITE (4): n equals a,t,g, or c
  SITE (38): n equals a,t,g, or c
  SITE (49): n equals a,t,g, or c
  SITE (50): n equals a,t,g, or c
  SITE (92): n equals a,t,g, or c
  SITE (101): n equals a,t,g, or c
ananaaaaaaaaaaaaaaaaaaaaaaaaaaaaaaaaanaaaaaaaaaannaaaaaaaaaaaaaaaaaaaaaaaaaaaaaaaaaaaaaaaaanaaggaaaanaggaaaaaaaaaaaaa

SEQ ID NO: 294 - DNA, 143 bp, Homo sapiens; identical to SEQ ID NO: 271

SEQ ID NO: 295 - DNA, 148 bp, Homo sapiens; identical to SEQ ID NO: 272
  SITE (136): n equals a,t,g, or c

SEQ ID NO: 296 - DNA, 116 bp, Homo sapiens; identical to SEQ ID NO: 273

SEQ ID NO: 297 - DNA, 86 bp, Homo sapiens
  SITE (2): n equals a,t,g, or c
  SITE (11): n equals a,t,g, or c
  SITE (13): n equals a,t,g, or c
  SITE (22): n equals a,t,g, or c
  SITE (66): n equals a,t,g, or c
tnttttttttntnttttttttntttttttttttttttttttttttttttttttttttttttttttnttttttttttttttttttta

SEQ ID NO: 298 - DNA, 126 bp, Homo sapiens; identical to SEQ ID NO: 269
  SITE (9): n equals a,t,g, or c
  SITE (17): n equals a,t,g, or c
  SITE (19): n equals a,t,g, or c
  SITE (20): n equals a,t,g, or c
  SITE (32): n equals a,t,g, or c
  SITE (107): n equals a,t,g, or c
  SITE (113): n equals a,t,g, or c
  SITE (117): n equals a,t,g, or c
  SITE (118): n equals a,t,g, or c

SEQ ID NO: 299 - DNA, 151 bp, Homo sapiens; identical to SEQ ID NO: 277

SEQ ID NO: 300 - DNA, 125 bp, Homo sapiens
  SITE (9): n equals a,t,g, or c
  SITE (10): n equals a,t,g, or c
  SITE (35): n equals a,t,g, or c
  SITE (36): n equals a,t,g, or c
  SITE (65): n equals a,t,g, or c
  SITE (77): n equals a,t,g, or c
  SITE (93): n equals a,t,g, or c
ttttttttnnttttttttttttttttttttttttnnttttttttttttttttttttttttttttntttttttttttntttttttttttttttntttttttttttttttttttttttttccacaac

SEQ ID NO: 301 - DNA, 2997 bp, Homo sapiens
agctggccccgtgttcaagggcgtctgtaagcagttctcacgctcacagggccatggcttcatcacccccgagaacgggtccgaggacatcttcgtacatgtgtctgagtgagtcccctccacctccctgttcttggcccctgccctagtgtccccaatggtgcctcaaaaatggctctccaggcctctcctctcactggctgaggtctgtattcatggtgccttttctgtcctctgagtaggggctgagggtgcgttgggagaggagggctggggccagggagggagtgggcacgcagaccccagaagcctgggagccagcggctgggccctggatcctgttacagcatcgtggaggtctgagagggctaggccagctcctgagcctcttggcctggaaagggccttcatgtgggtgggccaggaggtagagatggatatcatgtctaggcctggccccacccacttctaatgccaggaggaccgggggaggtcactgagcttctcagagctttagggacctccccgtgccctttcacatctcggtccccaagggacccagaaagggaggtacagtttatgagtcccattttattttattttatttattttttgagagggagtctcgctctgtcgcccaggctggagtgcaatggcacaatctcggctcagtgcaacctccacttcctgggttcaagcgattctcccacctcagcctcccaagtagctggaattacaggtgccagccaccatgcctggctaatttttgtacttttagtagagccagggtttcgccatgttggccaggttggtgtcaaactcctgactcaggtgatccgcccgcctcagactcccaaagtgctgggattacaggcgtgagccactgtgcccagccatgagtcccgttttacagattcgagagctgaggttctgagaagcaaggcctggccaggcctcctggcctagggaggcttagggccaggctgcccccaaggccaggccacaggattgtctggggcacagggcctgctgctgggctaatacccctcttcctgcccgccagcatcgagggggagtacgtgccagtggagggcgacgaggtgacctacaagatgtgccctatccctcccaagaaccagaagttccaggccgtggaggtggtgctcactcagctggccccccacactccccacgagacgtggtctggccaggtcgtgggctcctaggctgagtggttcacaggccagctggccgggggttggggagccacacagggtgaacgggcagcagccggctccatgccccactgccctggctgatgagtccttcggtggcctcagtgtgcacgtctgtctgtccgtctgtgcttgtggctatgagcgtgtgcctccacccaccccacgacccgtgactactgtgcaagctggccaggaggtaggtggagggcaaggccaccagacctggcttcgcgctgtccactgcctctctcctcccctccctgccgcagacacgcaggacccgctcgccctcctgcttacccgtccccacggtgactgagctgcgagagcctgcgctgggctcactccctggcctccgcccctgagctgtcccgtgtcagtccctggcccggagccaggctctctgtgctacttacatctccctcccttggctgaggtcccccgccacagcctggacccttccctcagaagcctggccgatgggtgcttttggggagcctctcagcctctggcaggggaggaggactgacacggaggcacacaggcctctcactgccgaggccagccttccttcctgctctgctctctcagtgccatggagaggcaggaagaggggcctgagggcggaaggggtttggggctcccatttcgccggccagtccctcctcctcagcctggcagtggcgctgggctccttcccctgggctgtactgagccgagcccaggggtttgcagagggtgggggtccatctctccagcttggctgcagacctcctttaccctgactcacaagccccactgatgctctgggccatgcccggctgacggctgctgtggatgccgcgagggacggacacacgtccggggcacccacgaggagggcccccagcctgggagactggccctgcggcctccacgtcaaactctcttcccaaagccctaacagaccagtggccgaggtgtggctcttattgcatccatccctgaagatgtgtggctgttgctgtcacctggagtccttttggggccaagatgtgtgtgcacccggggtcgtggccattcactcccaggcaggggtgagggtggcctggcccaggaggccaggaaggagggccctgtctgcctccacctctgggtgcaccccctgcctaccaccctcccttctagagagcacatcgcctgaccggggagaagtggggccgtggttcgagggagggctggccaggggtgggacccttatgagactcagtctgtgagtaaaactgggggctcaaatgcccaggatgaggggatcagtgactgtctaggaggatcccttgccttgtaggtgccccaagaccgcagggtagaaatcagccgggatgcctgcatcccacccccggccccagggcccaccacataaaatctgggagcccagagctgctgaggtgtggtcagctcccctaaaatgggcacggcccagcctgtcccatgaggaataaaggcccctggcccccttgagagagggcttgttggtgagggctgactcctgggggcccccaaggctcccctcctgtggggaggccaccttttaaggcaccactagcagtcaggatatggtggcatcagccctggggcctcctgggtggcaggggggcagcagctctcctccccactcacaggccctgcagtgctcatttggaattcctcccaagacccctggccacccagaccccccattcttcctaacactggcaataaaccctcaactgtgacccac

SEQ ID NO: 302 - DNA, 107 bp, Homo sapiens
gggacaaagactaggcctgggcctttggggtaggtcaccgatgaggtggcataggggagtaatacgggtccatatgggggaggccaaaggatcttttgggaaggaca

SEQ ID NO: 303 - DNA, 13058 bp, Homo sapiens
gactggggccaattatccattcagacacagctgacacctactttgttctgggaactttaatactgtgacaaagttctctaaaataggcaccttccccaccgtacctcatcgcccagggcaggcaggcagggcaggctagatctcgtaccgatacttgagcacgcctcctcctggtgcagaaagaaacctcttctgtaccgaaatacaagcagcagctgtggcctgggccaccaggtggagcatggggaacactctgggccctgggaggacgaagccagtgccactaggagcagactggctggggacggttgtccacacagactctggccccatctgggtgggcttgcagcaggcgtcctgggccagaggaggggccctggcatctatccaacaccaggacctctctttaggcctaggccaaactcttcagaagtcacgacacacagatgtgggccccggtcacgcctcatgagctgtctctgggaagaaaatctcccggcatcgctgcaccgtgtcctgaggagacaccacgctgtggccaacagtccgggggtcggcaaagatctcaaagtcgttcccaccctgcacacagaggatgggcagaggagggatatttaggtggagtccctctccacattggctgctacggacctgcccctcctcctgccccttcagaactgccaggaagcccaccttctcaccccttgtcagacctgccctgacttgctgtgtgatgtagaacaagtgcccagcctcttggggccccagctttccaatctgtgtaacggggctggtgagcaatggttgttctccaggagccccctaagaggtctgttgtgttgccccatgttctggccttgacctcaggtgatttgcattggagaagccaccagacctggcttctcactgtccactgcgttaggggaaacctggggtgggccacactcacagggctagtctcgttcccaaagaagtggatggtgtcgaagctgtcctggtccaggctatccaggcagtagcgcttgtcccagccctcggggaagacgtcaaagctgatcatgcctcctgtgggcaggggtggggactgttattccctgctgggaggggcagacaaggctaacagaagggctgcttgttcattcattcattcaacaacccttgagtgcctactgagggccaggaataggacacgggacagacttaggatcctcaaggaagttatgacacaggttggagaatgaacaagaccatgaagtgggtgggggaagctcatccggccagggtgatcaggggagacctctgaggaggtggcaatgagctgggacctgagccgagtggggatggctggggcgcaaagtacagcccctgaggcagggaagagaacgagcgtcccagcaacggaggaggccaggagaggtagggggaggacgggcaggccctgggcatcacatggagagggaggaagagcctggggaggactttgggcagaggcatgtcatgactccagctccagcctctctggccactggggaatgggtgaggtggcagaggggagcccagttgtgtcagggtcagttggagcctgggacaagctgctggcagtggaagtgtgagcaccggtgggattccagacagggggccctgtgacttctaggagtttggacttgggaaggggtgggggagagcattcaagggagaggctctggttttttggcctgagaaactgggtgggcatggggcgtttacctctgaggtatgaggtggggaaaactgggggccagtaaacactgaacccctttctgcatcgggctcagccaccctctctgccctgagccggggaggggctactaaagctactgggggccacagcctggtcttggcaggggcagatggtttgaggaggggccctgtaccaggcctcccaggtcctctgcagggtggacgtacctcgagagaacctcagccctttgccagcaaactctgttttcagggcttccacgaacttctcccggatcttctctttctgcagaggggagggagcggatggcagctcagaggacctgctgtgtgccaggccctggctgggcacacagtccacgtgagcgtgctgagcattctaggtgggtaggacccccaactgtgcagatgcgcaaactaaggctcagagaggggttgtgccttggtcaaggtcacctagccctggtggcagagccagggcctaaatccagaagggatggggctgccaatggggctgtgggctgggtcttctgaaggagacctcagaggagagacacgagtaggaagggcgaggagacggggcaatctggatcccacatcagtgtccacctcagggcagggctcgatcctgttatctgtaaccagctcaacaaagcaaatactcagaaatgagcatgggagctgagagcaggagacctgtgaggaggtggctgtgggcattcacagagggcagcaggatgccaggcatggcagagcacccagcatgcaaagacgcggctgggctggggactaggtagtgcccaggccggccccgtccctctgagcaggaactctggcagcagctccgcaaacgtggagcagggggacattctccccgccagcccccaggatctccatctcagagggccacaaaggggagcagctatgcccagtctgaggggcagctgaacatctaaaccagccagcaggacattcagctgacagagggtctcgagaccgggctgggaagtctgaccacatcctgggggaccaagaggcgctgaggattctggagcacaggagtggggtggctggtatggccctgtagtcagagccgggtaggactggggcggaaaggcaggcagtggtcagcagcatggagcttggagaagtggcccagggaggatgtcagatataaagccagacaccccctagcctgagatctgaaggcaagtagccaggcttggctactgtactcctcagctgtgtgaccatgggcaagtcacctgacctctctgagcctatttcctggactaaaggacagagaagtaatgaatgacccctgcctgcttccctctcatggaaaagcagagataagggatgtgagccccctgccagccttggcctggctttccagcaggtaggtgggccccagggaggccagagtccccaccagcgtccactctgtaggcccagggctaccactaagactgccccaggctctgaagaaatgtttccacatggccgaggctggctgcacctcccttctctggagaacaaggctggtcactagacagccccatgtgcaaggccagcctcagcagggaccggcactgtgacctcgagctggttactcaccctctggcctcagtgtcctcatctaaggaagggaagtactcatccccgcttcagggttctggaagatgagctgggttaagcatttatttacaccagctctgggccagggcagggcgcacagatcaggaaggttcatgctcctccagtgccagaagggagcaaacaagagccaaaaatacttgagaaggctctggggtggggagttagggtgtggctccccaactccatgccaggtggggtccatgtgccacctcatccagtgctcatgacagcccatgggatgggaactgctattacccccaccttacacataaggaaactgaggcacacgttagtaaagatgcttttccaggttacaaggcaaatgggtagagctgggactgggaacctgggtggacaggaagggataacttctcagcacgtgtattgggggggaagggttctttgcctaagaccaatcctaactaccccaaaaaaaaagtccccgtggccgggcgcagcggctcacatctataatcccagcactttgggaggccaaggtaggcagatcacttgaggccagggatttgagaccagcctgaacatggcaaaaccctgtccctactaaaaaatacaaaaattaggccgggcgcggtggctcatgcccgtaattccagcactttggaaggccaaggagggcggatcacaaggttaagagatcgagaccatcctagccagcatggtgaaaccctgtctctactaaaaatacaaaaattagctgggcgtggtggcaggcgcttgtagtcccagctacttgggaggctgaggcaggagaatcgcttgaacccgggaggcagaggttgcagcgagccgagatctcaccactgcactccagcctggcgacagagtgagactccatctcaaaaaaaaaaaaaaaaaaaaaacccaaaaccaaaccaaaaccaaaaccaaaaccaaaaaacttagccaggtgtggtggcatgggcctgtaatcccagctactcaggaggctgaggcaggagaattgcttgagcctaggcagcgaaggttgcagtgagctgagatcatgctactgcactccagcctgggtgacagagcaagactctatcaagaaaaaaaaaaaaagtccctgtgcctgtgggcactgcctcccctaagcctcagggcacaggtgggagtcaggagtcactgagctgagaggcaccctcagggaggcaccagagggccaatggcaaaatcaaatctttgctctgcaaccaactccctatgtgacctcgggcagggcccttctcatcgagccttggtttcctcatttataaaatggagataatacagctcatttcattcattcaaaaggtatttcttgccgggcacagtggctcacacctataatcactttggaaggttgaggtgggtggattgcctgagctcaggagttcgagaccagcctgggcaacacggtgaaaccccatctctactaaaatacaaaatattaggccgggcacagtggccacgcctgtaatcccagcactttggcaggctgaggcaggcggatcacgaggtcagaagatcgagaccatcctggccaacatggtgaaaccccgtctctactaaaaatacaaaaaattagctgggcattgtggtgcatgtaatcctagctacttgggaaggctgaggcagaagaatcgcttgaaccagcgagtcaggggttccagtgagccgagattgtgccactgcactccagcctggtgacagagcaagactctgtctaaaaaaaaaaaattagccgggcgtggcagcatgtgcctgtagtcccagatacttgggaggctggggcagaagaattgtttgaacccgggaggtggaggttgcagtgagccgagattgtgccacagcactccagcctgggtgacagagcgaaactcagtctccaaaaaaaaaaaaacaaaaaagggtatttctttgcgaggtgcggtggctcacacctacagtcttggtgctttggaaggctgagggagaaggcccacttgaggctaggagttcaaaactggcctgggagacacagcgagatcccatccctacaaaatattttaaaaattagcctggcatggtgtaatgcacctgtggtcccagctactcaggaggctgaggtgtgaggatcgcttgagcctgagagatcgaggctgcagtgagctaggactggatcactgcactgcactccagactgggcaacagagtaagaccctgtctcaaaaacaataacaacaaaaagtatgccatgtgccaagcataggggatccagaggagaacaagccgcagaaatccctcatggagcttacagttctgggacagggacagacagtaattcggattttaaaagtagatgatgaaagttgtccaaggctacttggggagaaataaggtaggggaaggaggaggaagtgcagcagtggatgtgatactctcggaggccccactgggaaaaggatgtgaaaggggatttgaaggaggggagggacgagctgggcctgagagaagtgtgctctgacagaggcacagcactctagaatcagccaagaggccatagctggagcagagggcagggagagccaccgaacaggtcagagagaatgacagaatgacgtggacgggccagcatggaaaggtctggatgggtggattgctccatccccgagagggagggaggcggtggggagaaaagcaaaatgcacatcaaggtttagcaggggcagtacaggcagaggtgagaggaccttggtgtgttccaggaatagaaagtggaacttgaagggcatagaaaggagacgcggagagccagagccagacagagccctcagggcttgaggcaccatagcagggggctaggacatcatccagttggcaacgaggagccaaggaaggattgtaaatgagggggtggggctggggggtgaatgcggctgacatgtttgaaaggttctaatgggctgtgcgtggtggctcatgcctgtaatcccagaactttgggaggccgaggcaggcggatcaccttaggtcaggagttcgagaccagcctggccaacgtggtgaaaccctgcctctactaaaaaagtacaaaaattagctgggtgtagtggtgcatgcctgtaattccagctacttgggaggctgaggcaggagaatcgcttgaacacgggaggtgggagttgcagtgagctgagatcatgccactgcactccagcctctatctatttttttggagactctatctccaaaaagaaaaagaaagaaaggttctcagtggcattgctggagagcaggctggcagggctatgcaaggggtagggagggacagagaggaaagttggggcagcctggggctggggaaaggggtaatctagaaagtggggtctcagttctgcagatgaacagatttgacactgactcgagaggctgatgaaataagagttgttggacccgatgtgggtgggaaggtggaaatgatgttcccaggtgttggcctggctcagtgggtggctgcctggtgctggtcacctaggaagggggaccagcagcattgtaaagatgcaggtgtgtctacaacaatggcacacagtaggtgcctgaaagggtatcagttaaatcagaacacatcccccagtctattttactgatgagaaaataaaggctcagataaattgagtgactgaggccctacaggcctaagattgcatagctagtggtaccttgtccagttcggagaactcgatcctctcctccagggtgcagctccggccgatgggcgagatgttcagcatgccattccggaactcgatgaaggttccactggtggtgagggagggcggggagccagagagaaccagaacggccctgaattcaaatctagccccacctgggaccccagcctcctaggacttcaaaggggacaagaatccacactccccgcaaaaaatcaggggcccaagtatctccaggttccctctgagggacccacacttctcctccctcaggccccaggttctggagaccaggctggtgggacctcaccgcttcttgggcagcctgagcagggccatgtagctgaggcagaagttgatcaagtcctgcagcagctcctcccccaggtggttctggatggtctggccaaggaacacagggctctgagcgtggcctgggctgcctgaccctgagacaggcacagtgtctctcccccagcccaggacagaagcccccttggactgctccactatggaaaagtggggtgcccctggctaagccctgggggacactgacctgcttggagagcagtcgtccgtgcttatactgcaccgtcccgttctcggcaaacacataatcaaacttctcaatgacttcagggtcacatagaggacaggaggaagaaagagtgtgagaccacgtctgtgaccccacgggcaagtaaagagagaggaagcctacacccttggtttcacattcaaaggccatttgttcaatctgaggctacaacctgcttctccagcctttctccctctgcagcttggttttcttccaaagaagccagtcacacctgtgggcctctgcacacaggcatccatgcaggtccttctgtcagaaccgcccttccctggcttccctgccactcatcctccaagattcagcttcctcctctggaagccatgcagtactctctggcagagggcatcatttccactctgtgctcccctgcccctctgcagaggggctcccttctgttctatagctgccatcgcactgggttctcaaggctggctgcatgggagagttggaggtttcagctctgactgccaggcgaagcagttggagtgggtgggaggtgggaggcacagggagcacagcccagaggctgttgcggggtctgggtggcacgtggttacctggactatgatggcgtggtggagatggagacagaggggacagggagatattttggggtttgctgatggaataaacaagaggtggggaaaaggaaaaattcgaggaagtttctggcttgaggaactggaggcacccactttgactgggctgagaccaggggctctgaggtccagtcgatttcctggataacttcagagtcatcctctgttaaatgggatgatcacgcctactctaaagtgtgattgtggggatcaaatgcaatgacattaacacatgatcatttttgacaaatggtagccatcattggttctgcccttttatttatttatttatttatttatttatttatttatttatttttggatgtgtagcctcactctgtcacccaggctggagtgcagtggcctgatcttggctcactgcaacctccgcctcccaggttcaagcgattctcctgcctcagcctcccgagtagctgggattacaggcacgtgccaacacacccagctaattttttgtatttttagtagagacggggtttcaccatgttggccaggctggtcttgaactcctcatctcaagtgatccatccgcctcggcctcccaaagtgctgggattacaggcgtaagccactgtgccggctggttcagcccattttaaagatgaggaaatcaagactcagcagggagaaatgagaatgtaaactgcataagggcaggttctgcttgctttgccccagccatttctcaagggcctggcacaatccctggcaataggaagtgctcaagtgtttgtcaaatcagtaagggaactatctggctgctctctctctatttcttctgccccacagaagcaggactggatctttgaagacgcccaggaatctctcaaactccccactccctctacccccagcctcactcctaccttcatccccgtcacccagctgctcagcgatcttacagtagtcagagccgcccaccacaccgatctgcactctacttcgtagcttctgcaggaaggcggccacctcagggtcaattttctatggggggagaggggaagcatagcattctggctttcaacatgtctgggacctccacttagccctcacttagtgctgagaacccaggaagcccacattctacctggatctgaagcagtacaaagcttagacaccaaaaattagacaggttggacactgtggctcaggtctgcaatcccaacactttgcgaggccaaggcagaaagatcacttgacccaggagtttgagactagagcctaggcagcaaaggaagacattgtctctatgaaaaaaaaaatttttttggagacgaatttttgttctgtcatccaggctggagtgcagtggtgtgattctggctcactgaaacctctgcccaggctggagtgcgatggcgtgatctcagctcactgcaacctctgcctcccgggttcaagcgattcttctgcctcagcctcccgagtagctgggattacaggcgcctgccaccatgcccagctaagttttaaatttttagtagagacagggtttcgccatgttggccaggctggtcttgaactcctgacttcaggtgatccatccgcctgggcctcccaaagtgctgggattataggcgtgagccaccgtgcctggccgaaagtttttaaaaattagccaggcatgggctggcacggtggttcacaccagtaatcccagcactttgggaggcccaggagggtggatcacttgatgtcaggagttcgagaccagcctggccaacatggtgaaactctgtttctactaaaaattaaaaaaaaaaaaaaaaaaaaattggccatgcgcggtggctcacgcctgtaatcccagcactttgggaggccgaggcgggtggatcacaaggtcaggggattgagaccatcctggctaacatggtgaaaccctgtctctactaaaaaatacaaaaaaattagccgggcgtggtggcacgcgcctgtagtcccagctactcgggagggctgaggcaggagaatggcgtgaacttgggaggcagagcttgcagtgagctgagatcacgccactgcactccagcctgggcgacagagcgagactccgtctcaaaaaaaaaaagaaaaaaaaattagctgggcgtggtggcaagcgcctgtaatcccagctactcaggaggctgaggcaggagaatcccttgaacccgggaggtggaggttgcagtgaaccgagatcatgccatcgcactccagcctgggggacaagaatgagatttcatctccaaaaaaaaaaaaaaaaaaagatattagccaggcatggtggcacttgcctgtagtcccagctaccagctactccagaagctgaggcgggagaatcacttgagcccaggagttcgaggctgcagtgagctgtgatagcgccactgcactccagactgagtgacagagtgagaccccggtctctaacaacaacaacaacaaaatagcatcacaatcaagttgatttttgaggagccaaagaacaataacaaaaatagcctcacaaaacaatgcttaatatttgctctgggcaaatagatccagataaaggcctggagggaagccacaccacagtaaccacattaacttggggagccggccaggctccccaagtgcggtcagagtggactttacccttctctgttacgtttccattctttaccaggagagtgtgctcatgaaaatgtgtacgattaaaaattaactttcaaaaggcactaagcacagaggctggcccgtagacaaattaataggctgttcttattcaggttgttatgtttgtggagcaaaaggtcagagggaggagtcagaactgtgcctaggccctgccacttttgttccagttcttttattcatttatttgtttgtttgagacggagtttcactcttgttgcccaggctggagtgcaatggcacaatcttggctcactgcaacctccacctcctgggttcaatcgattctcctgcctctgcctccccagtagctgggactacaggcacacgacaccacgcccatctactttttgttttgttttgttttgagactgagtctccctctgtcgcccaggctgtagtgcaatggcacattctcggctcactgcaacttctgcctctcgggttcaagtgattctcctgcctcagcctcccgactagctaggattacaggtgcatgccaccacgcctggctaattttttgtatttttagtagagatagggtttcacgatattggtcaggctggtcttaaactcctgacatcgtgatctgtctgcctcggcctcccaaagtgctgggattacaggcgtgagccactgaacccagcctaatttttgtatttttagtagagacggggtttcaccatgttagccagactgatctagaattcctgacctcaggtgatctgcccaccatggcctcccaaagtgctgggattacaggcgtgacccacaagcaaatggcccacctttgctccagtcctgctatcttcctcccggatccacccctgcaggaaggcctccagggcccaagccagggcaacttcaccacagaggatggggaggggcattcgggacctaagagaggaggctaagacctgggttcccatcagccactgcccagtaaagcccatcccactgctcccccacgctaggagacctgttggttggtccttgaggcccccagactggagggtgggttacccacagggagggcatgaatgaagcctgcttactgatgcatccagctggtgagggggcttttggggactcactcacaatgagacccaatgggagaaaaactgagcagaggtaagaggctcaacacagcgagagtctttagaagaaaactagactcttaccctcactattcctcagtgtcctcacagcaaacaggctaggcctggagcctctcacatccgggtgggtagagctcataaacgaatttgaaaagaagccctctctgctccacgactgggggtggaaggtaaagtgggtgatggggcttcagaaactagacccagtcccaggcctgcaaaggtcggggtgggaagactccgagacgccctgtctcccaccagatgatgactgacgcttggctgtgtgcttgtgtgcctggaaccccggttcagaagccagctccgaccactggtgtgtcgtagggctgaactagggtgggatccccagctcaggaggcgggggcgtccgtgagccaggccttagcggcgtgtgacagcctccggggagggagggagctaggcccctgctcgcagcctcctccctccagtactggatccaaccccagcactcccaagcagaacacaggcaaggacgctgcggggtcagtgacgtgagggccaggtcccctcactcccggtgggtggccccggatgtcagggggccgggtaccgccgcatcccacactcggtccccgggtgtccacggtcacgctgctgcagaccccacactcagcctcgggggtgtccgcgtgacactcccggtgggagcttccaatcttcagggtcctacctggcgagccggcgtgagggtcccgtccacgtcaaacaggcagaggacgcgctccttcctgcgggctgcctgggcggtgactgccatggctgcaggtccgcgcgcggggcggagtcccgaagatgcaacggcagaagcagctcagggataagtgctgacggggcggggcattagggggcgggggccagtggactgcct

SEQ ID NO: 304 - DNA, 3931 bp, Homo sapiens
gagaggtcggcatctttgttccctgcccggccattgttcgtgccgcgcttctagcaacgccgggccggtaaccccctctccctccttgcacgttccgggtctcgtgagttggctgtggggaccgggaatggaggcgggtcagggagggtggggctggaaaaggggtgtggaaagtgaacctcagccgctgggaagtgggagccggaggagggggcggcggtcagtgccgggcggcttcgggcgtcccctagaccagagtggtcatccccagctgtggggacattgtacaagaaagggttgtaggaggactgcgaggctgaagggtcacctcggtgaataacgacaacaggcttaggactcagggaaagaaacacccgggagaggaagttaaggacaattaagactttggcagccttcacgatggagaacctgtataccctcttacctctagattctgaaagcaaattaaggggcgttgaatggactggttttcaagcgcagaatgtagcagttcccgattcccttttccttagttcattgattctcaaaccttataatacatacaaatcactgaggagcccgttaaagggcatattctgggtctccctgtacttctctccacctcccaattcagattccccagatgtctgccatagggcctttcaagctggaattcagctgctgcgctgtgcttcctggcattttggagacacacattttgggaacacccccatgggtttcaggggcttcctgcgtctgtggagaaaacttttcccttgggcttctttggcttcttaggattgtcctcaaaaagaagttgaccttgggcaatctacttaactttccctggcttccatttcttatctagtgaaataattattataataaaacctcagtgggtaattgtgaggatgaaatatagtcttgtatctgaaagcatattgtagacttgtgcagtgttgactgttattcttcagtagcagcagggcggtgtggaaagctccaggacttggaatccacctaagcctttctttctgtaaatttagtgaaaataatactaaccttaaatggttgttttgaagattaagaaaactgaagtaaatagtaaagtaaatgttggttcgttcatttagtcgacagtaacaatatttccatttattctttctctaagttgatgtttatacagtgagttcaaactttttattcagactttctgagtgatcggtgcagtccctaattcatgggctgttttcctccatgaactctgtgaagcattattgctatttcttcttcacataaagaaatcaagattgaaagaagatttaaaaacttggcacaaggtcacacaactagtaaatattaggatcagaataaaacctaggtctgggtcagctgtggtggctgacgtaatcccagcactttgggaagccaaggtgggaggatcacttaaacccaggagtttgaggttgcagtgagctgtgattatgccactgcactccagcctgggaaacagagtgaaattccccatttaaaaaaaaaagaaagaaagaaaacccatatctgggtaacttaaaagcttatgctcttagcacattatgaatatatatatttccattatttccatcctttggtcaccaaatcacttttcagagaagagctttagggcctatgataattgcttgtattatcagtttctgtcatcagctattatcatttttctatataaataatttatttttactgcttaggcaagcgcctccaaggtttgtcttgaagcatagctccagctggagggtaccttttaagctgttcaaggtcaagatgaatacaaactcaaaggaggttttatccctgggtgttcaagttcccgaggcatgggaagaacttctgacaatgaaagtggaagcaaaaagtcaccttcaatggcaggaatccagactgaaacgcagtaatccactggcaagggaaatcttccgaaggcactttcgacagctgtgctaccaagagacccctggaccaagggaggctcttactcgactccaggaactttgctaccagtggttgaggccacatgtgagcacaaaggagcagattttggatctgctggtgctggagcagtttctatccattctgcccaaggagctccagggctgggtgagggaacactgtccagagagtggagaagaggctgtgattttgctggaggatctggagagagagctcgatgaaccacaacatgaggtaggaagggagatttgctagagaaaaatgtgtattttggcatgccaagaatccttgtcacttctgctttgtgtctccttgacattggtgataaaatactctcttcctgtttccttctttcttggaagtgtttatttcagacagttaattttttcaaaagtcaaatcttgtctttttgtccccagatggtggcccacagacacagacaagaagtcctctgtaaagagatggtgcctctagcagagcagacaccactgacccttcagtcccagcctaaggagccacagctcacatgtgactctgctcagaagtgccattctattggagagacaggtgagggacagcatttatttgatgttgaacgaatcccacctggtcaagcaaaaacaaacaataaacccagagctgggaaaacaggagacccaaagactccttaccagatagcagtaatggtcagttcttctgagagcctagtgtgctcatctttgacccttctccctgcgtgcagacttctccctgagtaccaccctggaagctttctggacttctgatgcatggtacatgaggaaggctttcagggatcgctgtggagcacagcttcagagaatggacttcaaggtttgacagacaggttcagatcctggcatcgcctcatggaagctgcttgtattgggcagattacttaaccacttgacctcagatccctcatctacaaaatggggttgataatagctttggtttagtctacttgcgctgccttaagagaataccacagactggttgtctttaacagaaatttattttctcacattttcaaaggctagtagtccaagatcaagataccatcaggtttggtttctggtgaggcctcttcctggcttatagatggccatcttcttgctgtatcctcacatggcctttcttctgtatgcatacagagagagagcaagctctctcatcttataaggacagataccattcctacccgatagggcccttccttataacctcatttaacttttaataccttcctcaaggccctatctccaaatataatcatattgaggggttaggacctcagcatatgtgagggaatacaatttagtccgtaaccagtatgtacctcagaaagtcattgtgagtatcaaatacaatttatgaaaagcacttggcatgcattatgcttaatacatggtcactattgtcacaaatcaccagtgccacccttgctgatttgggttcatacttggagtagaaagatatcagatatgcttagtaagtggcagaactgtatgggagaatccagtgaaatcagactttgccatttccttctctgtaatcttctgagtggtggcagtgaccacccttgtggatatagtactgagcacttgggactgagtcagctgctttcccattctagccctccctgcaggaattggctctagcttgtctgatttcccacacataaaatcatgccctcttactgactttttgttaatgttctgacaatcaatctgtagcaaggttctactgttttcagtttcatattacccctatatgcatcaaagctgcaacttcccttgcctctttgtccctaggttctgtttatttcatttaccctagcaattatggatttctattacatggaactcatctcttgatttaaattaaagtgtatgtgttgagtaaa

SEQ ID NO: 305 - DNA, 578 bp, Homo sapiens
ataaagccaatattataaaacaacatagtgtttgaaattacaaggaccaaattcaagttccagcttttcaaattcttagccaagcaatatttaataggtaagcttgagtttctttttaagttatgctgattatttaaaaatccaaataatacaaaagtttatatagtaaaaaatggaagttttccaaatcctactccctagaggtagctactcttgtcactttgctgcatattttgcagacgtttctctatatagtctgtctacccatatatatgtatcttcccatatttttctttttttttttttttgagacagagtctcgctctgtcgcccaggctggaatgcagtggcacgatctcggctcactgcaagctccgcctcccgggttcatgccattcttctgtctgagcctcccaagtagctgggactacaggcacccgccaccatgcccggctaatgttttgtatttttaatagagacagggtttcactgtgttagccaggatggtctcgatctcctgacctcgtgattcgcccgcctcggcctcccgaagtgctgggattacaggcgtgagtcac

SEQ ID NO: 306 - DNA, 32204 bp, Homo sapiens
tgcacgcgcacgcaagactgcgaatggtaaactttattaatggaaaatggaatgcctcgttaacagaaaccttgatttaaaaatggcagaacaagaacacatttatttaaaaaaaaaaaaaaagtgagttcacattgtattgagctacaacatggtggcaggatttactttgcttttaaaaagatcccccaagttcgagggaaccctggctaccagattcaacagtgcgtctgcccacccgaaaactcgcagcgagtgggacttagtagcggcgggtgaagtgggggtacggggggggatgagggtgtgggtgagggactctgctgccccggtcctggctggccactccgccaccttccagtccgccacctggcaccacgtggccctgggaatgtccaccttgtgcaaagccgcctcgcctaggaacaaagtcagacaatttttttccccttgaagtgctcagcgttttcatcgtaacatgggttcagtaacggtcccgcagcctttagagcgcttgggttttttttccaggtgagaaaaatcatcatcgcacattgtattccaggtaactcaagagcgttatttgcataaattgcaaagagctgctttttgctttgttttcataacatccaacccagccagctgatcaaacatgcaaaaaagggagaggaagtgaggagcaggagtgaaccaccgtcctccacggacgacacaccttaccccgccactccaccgcggcttgccatgtgccccggccccgagggcccagacaggcccctctcgccacctagaagagaagaagggtctgcaaacactccgttcctggggaagcccctggacacatgtgggggccacagccaccctcgtccctggagccagccccgtaccttgccacctggcgtgctcccggctagccgcgcctgcgtccatggcaccctgccaggcgcgtgcctggtgctcctctagccgctggttgtgctctccccagtcacggccacccctttgccaaaagaaaaagacatgcagccatctaatgagcctccagggttgtgtcggcagcaggcgcacccaccctgacctcagctgcatggtgggtcatgccacacaacaagggctgcatgtcaagtgggcaaatcaagggaagggacatttccccaaagacagatgtgctagtaagcacgtgagaaggtgctcaacgccacccagaaatgccaatccgagccacaccgagatgctacctccccctggctgggatgctagaatcacacaataacacacaccgtggagggtgcgaggaaagggaagaacccttgtccactgctggtggaaatgtaaaatggtgtggccactgtggaaaagtttggtggttcttcaaaaagttaagcgcagaattaccatgacccagcaaacccattcctacctgccagaaatgaaaacatggccaaagacatctgtgcatgaatgttcctagcggcaggattcctaacagccaaagggagaaggaccccaacacccatgaactgatgagcagataacactatgtagtgtgtctggaccatggaatgttcagccctaactaggaaggaagcgctggcccaggcagcatgtggagatgagccctgaatacccaaggcttagggagaagccaggcccagcaggcacaccgcgcaggccaagaaatgactcaagacggcaaatccagagccagaaagggacctgtggctaccaagggcaggggggagggtgcagctgctaaaaggggcagggtttcttttgacgtgatgaaaatgcttcagaatcagccgtggggatggctaaacagatccacgtacacgcaaacctccactgactgcacacgtgaaacgggaagtgtgtgtcgtgtgaactatacttaaagaaagctatttgtttaaagtttcagacaaactctgggagatgaaaatccgagtccagtgtcctgagtcccaagtggccaagcagtcacagtggccgtgcaggaaagcagccagacccatctgcacgagtgcctgcctgctgtgggttgccggatgcagtgacagtcaggccaagtgagccagcccacaggcccgagaggggccaccagagcccccagcgcgcactgccaggcaagtgcaataccgccctggagggagcggaaagctcccgtgtggaacctgccctcggtgacccgatggcgcccagccgctgctcaccatgggtgagtttcccgtttacactcccgaggtatttaccataacacccagcaagcgacaggacaggaatgctaatgaagtctcacaggagagaacacttcacaccaactgatcagagcactgccaccgtctgtgctgcccagagattcaggagaagcttcgggtgtcctgggacactcggcacagcaccgagtcaaagtccctggcagagctggaagtgcctctcagcgcggagggagggatggaacgggggagcacagggggccaaaacccaccctgtggcgctgggcagggtccgaggcagccctgggccagggctggagacaagacaggacactcggctcacagaggaaagcagggcagcagccgcaaagcagtcctgccaccagcctcctcacggccagcccagacggcaacaggacaaacaggcaggggtgactgcagctggccaaagaaactagagaggcacccagagtcctcccagacaagccctgccccccaccaatgctgacaaggctcagaacagcacccccactgcagtgctggtgaaggtggctttggacacctgtggaggacctggcccagtgtcctcagccctgagtcctgggtggagggtcctcctaagtgattctaataggcaggatagggttgagaagatccaccccagaccaactgggggtcagagaaaaaacccgaggaagacacgtgtcaagaggcaacgtggaggcaggggcgaggctgctctaccacggacggggcaggactaagagcttcagcgctgtctctcccagtgtgtacgcagcccatgatcgagacattcacaactgcaggcgacccccagctcaagaatggggatgggccattctgggcgacctggacagctccatccctgaaagcctgttctatgctttcttcttgagaacctggactttctgagtcaggggtttcaaatggcaggacccctggtagcccatcctaaagctcccctagctgaatcaaaccttggggacgtgcctggccaggcaccaaccttttcccaggttaggacagatgctccccacccggctggggctcacccactaacctggggggagggggcagcccccggccttcactcagcctcttgtcggagccgtagcccccccagccatcacgggagtcccggccgtggcgctctgggggtcctccgtggccatggcggtcatctccatagtgctggaaggcaggagaggaacagggtgacactgaccatgtcacccacataggcccaccttccggaaggcctgtccactgcaggccccagggtggcaggtggggcggagctgagagaggactgaagggtgcagtctcagccctgctgggccctgcttcactgaccctctgctccctggctcccctcctcgcacccctacagctgcatcactgccccacctgagctgccccaggagccagggcaccctggcattactgccctcaacagctctgctcaagatccactaagacgtcaccaaaccctgtcttccctgagaagttgggcgccgcctcctttccgataacaggagggccctcgggtgggtcagcccccctgtgctctggcagggccacaattccggcctccctggccaaccaactctgcacggagcagccagcagccaggaagcaggcgggtgctgcctgctgttacaggccattactctgccgcccacctcccacctctccaccaggctgctgctttctcagaactcacaccctgccaccacgcacggggcacccgcatggcaccacagagactcagggaccattcttgtggtcttcagccccccgtgcccaccaagcacggacttgaaacatggggaagcccgggctcccccatccccccgaccctggcacatgtgggctaaacgacaaccaccatttgggttcttgggggaccccacaggcactaagacccaaaggctccctgagcaagtggacaatgaagagacacatgaggtttctaccggatacaatgaagaacaagcccaacatatttgaaaatgacagaaacttgagcattacaaaacaatcaaatatttgcgctttttttttttttttttttttttgagacggagtcttgctcttgttgcccaggctggagtgcaatggtgcgacctcgactcactgcaacctccgcctcccgggttcaagcgattctcctgcctcagcctcccgagtagctgggactacaggcactcgccaccatgcctggctaattttttgtatttttagtagagacagggtttcaccatgtcggccaggctggtcttgaactcctgaccttgtgatccacccacctcagcttcccaaagtgctgggattacaggcatgagccaccacgtccgactaaatatttgtacttctagtcgctggccagaacccacacttgcatacccgccacacgtgctgacttggttgccacctctctgggatcaagcggccgcctggctagaaatggtccgctatgcctgcacagcagtacagtggccccagggcttggcatcggggctctactcacctgcccatcccggtggtctcccatcattggcctcgaaccctcccgcctgcaaaaggaaaagatcccgttcaaacagcaccaggcacgactacacatttctgcaggtcaggcaagtttcgcgactgggatactttttccatcccatcacataaaaactataactggcctgggaaaaaaggaaaaagctagctcaaatcgaaaggcttttccccgggggcagaaacgaagttggatcctaaagaggtaggaataaagatctcactgaactaaaattcctcggggagctctcagttaggggaacagggacaaacagaggcctccaatgatccctcatctttggtctgacccaatgcgtgggactcatcaaaattcacaccaactccaccccaaactccagcagaattaagagtgtggcctctcagcctccctttcctgttctccccgctctgacattccgactgaaggagccaatgaatggggaaatgggtcagagatgtgcagccgaggggagcccaaagacaggattcttacactggaaaaccaagggctgcctttttaataaactagatgtattcctcattttaaaaggctaaaaaacccacccagaccctcgaaatacaaaacaggcctcatgagaaattttgcacgtcctccatcaattctctggtagctcttgggcacaaccaggttgtgctgacaaacactgctgcctcacaagagagctcagtgtagatggcctgcactcaggcccctcctggcccacctatgaaaagagtcggtggatggaatgagctctgagatgccttcctctgaggtaagctggggattccagcaactcgctcaagttctgtgcaaggccagagtcatccactgtggatctcagaagtaaacgaggcttcagagcacacaggaacccctgcactgggctgagaacgaggtcagctggatgccccggtgcccacaatgactgtagctaaaggaggggacaagaccactgacctgtcgatggcgtggtcctggtactggccccggtctcgatgatcgaagtcgtgaaagcggtggtctggccggggaaagtctgcacgatatcggtcctccattgccacacgctttccttctggccaataggcatcatctcgtctgttggtttttattttaaaagaatacaaattccattaatgagagaggaggaggaaaaaaggaggaggtggaggtggggaggggagctctctccccagacccagtatcgtttaaaatgtcctgcagggctaatctctaaacattcgatcatcattgctttgatctgataaattaaaaccgccattaacagccgagaggcacacttgtgttctcatccaacagtcccaaaaggagcactgctgtgagctcattgtctcgtgaggctgttattaccttgatcccccctcatgagcaactgaaaagaaatatttgattcttctggaatagcattcgagttgccacacttttactttccctgccttccacgggagcctgaatctccctctgagtttcttgcaaaagcaaagagaattagatggggtgatagtgaactacacacagctctggacggcatccaattatcttcttcctgatttttaccagaaaactaggctcacggagagcggggtgaagggtgactgtcaattaagccgcctggggtagctagagaccaataaacctactttctaaatcagaggcaatttccttttccacagcgcctgctctgcctctctgtctacaaggacacatgagaccggcagagtcagcggtggccaacttgggcctaacgggcgttcggttgtctcgcaagacagagaacagctatgctccacgggtaagtggagaggaaaagcatcacaaacccttcagcaagtggcagccatcaagtttcccagaataactcaagttcaggaagatgctacacagcctccggtgaggacagcgaactaataaacctgcagcagcgcagtgagatcggcggggggtccccaaggcgcatgctccatatcaaatttcattctccccaccgacagggacggaagggaagccgctgttctgctggaagggtgaacaccgctgccacgctggtctccgtcctgcccacgctctgggcgggactcaccggtccaggtcgtagggcctccgcccgggccgccgctcctgctcgtaacgcagctgctcctgctggcgccgcagctcctcgcgctcgcggtggatgcgctcctgctccttcctgcgctcacgctccacgcgcatgcgctcgcgctccagccgctcccgctccatgcgctcccgctccagccgctggcgctggcactcgagctgcaggcgttcccgctgtagccgggccttctccttccgctcatggaaggcctcgaggcgttgctcccgctcccgctgctcgcgctccctgcggggacaggtgaggctgccctgaactccctgcgtgagcctccaaggagaaagcccggtgcccaaaactgggtgtgtattggaagcagaaaaaaaaaatggatccaaaagctcaccgggcttccctaaagctgcgcgtgcagggggttaccttacttaacaaagctaccttaagaaaagcaaaggcagcacagctggcaacatttctaggtttgctcgagaacattttccaaatgctgtgagcacagcttttgctttactgagcaatatttgaggaaaagtgacaagagaacgccgggcatcccgacatgaaaaggccgaatgtcaaggcagagggacaagcctccttcaagaccacagcccagaagggagccgcggcaaaatgacaactggactctgcttgcagtttctgaccttaggtgaaaggtttcaacagggaagacaggcctcagcacccaggcaccatcccatcccatcaaagccacacacggctgggccttccacacgggccaaggtccaacatcagaggaggggcgaaaatagactttgagccagcagaaggctcagcctgtaatccagcacttagggaggctgacgcaggaggatcgcttgggcccagcagttatcagcctggcaacatagccaaaccccatatactgtaaagggctttgatgacttctttttaagagacagggtctcactctgtcacccagtctgcagtgcactgttgtgatcacagctcactgcagccttgagcttctgggctccagcaatcctcccacctcaacctcctgagtagctgggactacaagtgcacgccaccatgcccagctaatttttaaatattttgtagaggtggggtctcgctacattgcctaggatggtcttgaactcctggcttcaggggatcctctggccctggcatcccaaagtgctcggattacaggtgtgagccactgcacctggccctttgatgactttcatgccacctggcatgtctggcggctcacgtgtgaacaggtgctggcccctgcctcgaggacccaggttaagcacgacacccgccagcccaggcactggctctcgggcacacagactgcgcactccaagtacagctgggagaaggacagccaccccgagaggaaaccaccagcccacagcctcacccagctccactcaccgccgcctctccgtttcgcggatctcccgttcccgctgcctctggcgctctctctccctttgttctttgattttatcaaacgacaagatgtctctcttttctttgctttctgacttgcgatcctgactcttggagctctgtttaccaaaactggtttattaatgtcaggaaaatgattgcaacaaacaaacaatggagattatgcacgtgtgcatgagactaagattctctggccccacatggtgtagatggaaggctgtggtctccagaccagaggcccaggcataggctgcttccctccaagtttgcattttactgcctaatccagaatcctgctttcagatgtcaaggggcattcatggaagagaagaggttggcccacgcctcagaaaacctacaggcacagttcttctagcatagcacagccaaggactcacataatccaaagcaaacctaggcctctcagagccacgggcacatccgcacagggccactgtggccattagttcagaggggacagcagtcaggccagctgtttggacagctggagggcagactacatgtttcacatctcaactgctggctcaggactcaggcagacagctctaaatagaatatgccaggccgggcgcagtggctcacacctgtaatcccagcatttcaggaggccaaggtgggcggatcacaacatcaggagttcgagaccagcctgaccaacatggtgaaaccccgtctcaactaaaaatacaaaaattagctaggcgtggtggcgcatgcctgtaatcccagctacttaagaggctgaagcagaagaatcgcttgaacctgggaagcagaggtggcagtgagctgagattgcgccactgtactccagcctgggtgacagagcgggactccgtctcaaataaataaagagaatatgccaaaatgctttaatgcaaaacagtgctcctaataaggtacagaacactaatagccaacttccgtaatttattttttgtaggttttttgggtttgagacccagtcttgttctgttgtccagcctggagtacagtggctcagtcacagctcactgcaggatcaagtgatcctcccacctcagcctcctcagtagctgagaccacaggtgcacaccaccatgcctgactaatttttctatttttgtagagacagggtttcgccctattgtccaggctggtctcaaactcctgagctcaagtgatctgctgcttcatcctcccaaagtgccgggattacaggtgtgagccaccgcacccagcctacattcatcattttctatctgtggcataaagctcagagctgtaacaactgactcccatttccaaggttctccagggcccctcacccaaactggctacacatcagaccctcccaggaagcttttaaacaacacagaacctgaggcctcctgctgatccacacagaatctctggggcaggggcctgggaaatgacatttttaaaaagctactcagtttatttccctaattagcccccataggagagaaagagcgagcaatgaaaaacaaaccaacccaacagaaagacaggcaaaggtcaagatgagacattacaccaattattaataaaatgcaggctggggagaaaggggcacacagacacaggagagacacacatcacccagcactttgatggcaagctttgcctacgagacgggcagatgtcttacacacactgcagtagaataaggtgacagatgcccacataccaccgcacagtgggcagcacagcaggcaacagtgtcagcacgggactcctgggttctcaggccagcttagccacttactagcgacctggcaggtgcaacacacccaggagatttaagtcccctccacaacctttctgaacagcactttatttcaaaatttaaacgttaaaagaggctgggagtggtggcgcacacctctaatccagcaagtttggaagatcaaggcgagagaatcacttgaagccaggctaagcaacaaagtgagacactcccaccctttattttttttaataggtaaatatcatgcataaaataaaaaatatatgtaaaagcgaaaagaaaaaaaagcaaaaaggaaaaaagccaaaccgtatgtgtctgtatgtagagacctccaaggcatattacacagaaagtgcaagctccagcacatcctctgtctgtggtcccatggcaggcacaggggacgtgtgtgcagaggaagccgaggagcccaactggacacacggaggctttagtatgcccgtgctgcatctcctcaagctgaccagatgttctaatcatgcatgtgtcatcactacttgttttcaacatcacagttacatgggggtaagagtatgggtctttttcaatgttctactctacatttctctgtatcttatgattttcatgtgaaaaatgacattaggaactgatactttataaaatccaaatgttcattttaaaaactaagtcttggttgggcacggtggctcaagcctgtaatcccagcactttgggaggctgaggcgggtggatcacttgaggtcaggagttcgagaccagcctggccaacgtggcaaaatcccgtctctactaaaagtaaaaaaattagcctggtgtggtgatgtgtgcctgttgcctgtaatcccagctactcgagaggctgaggcaggagtcgcttgaacccaggaggcagtggttgcagtgagcagagatcacgccactgcactccagcctgagtgacacagcaagactccatctcaaaaaaaaaaaaaaaaaaaagttaagtcttaacaacacaaagtggtcctggctgaatatggtgaactccacattcgttaaaaaagtactgtcacctcatgaatatcttagctagaacctgcagctgggaagcagaggtttttattgtttcccagagtgaaaaacgcaaatgagacgctatttcgtctagttgtgtgcacaactcgagaggtacagctcttgatctgataacatgaccagctctctgtcctaggttggtctctacctttttggttaatttaataggagactaaaaaaccaatggaagaaagtagcctgctattaagtcaaccaaagagtaggacctgccttccggctcgaaaagcctgggtctggcccatcccaccctatggtgagctgccgtgtgaaccaatgctctgtctgaaggcggcacatcccggtcaggagccagtaagggaagcaaacacggatgggcactgctctgcagaaagcaccaggattcatgtgtgtgtctgtatccgcaatctacacaattatcgcgcctcctacaaacttcaattttaaaggcaaaacagtgctgttttcataatgcggatcaaacgggccgtggagccatcgtgagaaacagctggccctgagatggcagaggcaatactcactctctctttggacctgcttgtggttttcacgctaatgacgggctctcctttcgatttatccatcacgaccgtccgctccattcctctgcttccttcaggaaaaaacacaacaaactatcaaaacctgtggacgccccaacttcccgcagtaaacagcactctgatggaccctgggcttttgaacacacaaggcgtgagtcaagtgactgacactagccttgggagcctctaattctcatctattgtgagcaacacggtaacacgggcacagcatcatgggggtaccctcacagctctttacacaactagagggacctgttcccaacctacagcttaaacctgcagcacgcacacaagcacggccatcctgcagagccctccgtgaccctccactctaaacccacacagctccggagctggtctatgctgtcactcctccctgacattctgtgaagctccgcagtatccagcctgtgctaggaatcacactgccactctgagggagtgccttgccagacgggtgggcttccctccattcatctccagcaataaaggcttccaaaccaattatctctcctgacgacagaaccaccaggcataaaccactggaacaatgacttatttggggagatttataatacttgaggaacattttaaaaacacgttcctcgtgagactcagggtaaattagcccgagagctgaagatccagcttgtaatgtgctgtaccaaatttcaatgctccagatggttgggttttgtctctgtttttctcttccttgatgggggaggtggagttggcttatttttttttgccactaaacattctgagtctcatacagattcaaaggtgtaaagcacaatgaacctttataaaatgacaacagaagtggcatcgtccaaacagaaccacttcaacagatgcttggaggtttcatttttctctgtgtttttactacctccagctttaacataatgtgggaaaactttactgcacacctgcaaaatagcatcaggttagttacaagaaactcggacaactcactcttgcaaatcccacactacaatcagccaaaggccctgaaaaagcccaaactcaggcagctgagttcagcaatacacataagccctgagtcccaggcacttctggattcccgatgttgtatggacactcctttaagccatttcatcaacagactcttgtttctttaacactgccatatgaacagcgaaacagccatgtcaccagagcttgctgtcctcaccttccctcggaacccccactccccacccgtgccaggccttccccttccacagctcttaaaaggctctcctcacctgatttggtgactctagaccgatttgtaggtccgggtttcagctcatcctggtctttttcttccttcttaatgtcttcaggctttttttcctccttcttctcaatcttctcttccttcttaattacagttctatttaaagacatggttatcaaatttgagttcacaagactctgtaacaggaacggctcacccagagcctcgactcacacatactcagacgtccacacaaaacaaatcaccccggcagcaattaggtgggaaaaattatttggaacccatagtaataacaatactcctctttagatacaggctgtattcccacttctagtatgtgctgaattgagggatatgcacaatgaaattcctggggatgcgtttccaaaatgtcagacaggctagcacgcaagagtggtgtgcaggtggacatgagaaacacgccaactacataagaacacttctaaaaagtttaatgtttcatcatgtatgtgtggaacattgtttataagctttatagggaaaagcatttcttcccaatacagcctcaacgggatggaggcacagtggcaggacaccaagcccccactgcacagagcggcaggccatttacccgtgaggccaacacccctcgaccggtaactgctgcatacttttagggagttaaaataatgtgttatgtgccagtgaatacgggaaggtgttaagtgccatttcaaccaaaggcaactttcttctaagcagtgaaataaatcatcttcgccactcaaactcagctgctgcgttccctaatgccatttgtctcaggcaattaaactgcacaccgactcaacaccaacgacatgccagggtccaggcaggaaagtcaggcccctgcaaggccctccagcaagcacctgttggcctctcctccaaccgacccaggcagggttcccggcagagctccagccatgccagggaagcctctctgattgccccgtctcctctgcccttctcaacctccacatcatggagttgtctttaaaaaaaatatatatataccattttgagaaaaattttaaatacacaccatagtaattaatggtacatcccagaactgactattgtaaatcatctcatctcctctccctcatccctgcgacaaccaccagggtggccttagtgtcaatcactgggtctgcctgaccgcagtaatctacagtgacattttgtaagaatgtcttaggagtgacacgaacgaggccatacttcatacactgcttacttttgtcacctcatggtatgctttaaagaagggtttttaggctggtcgcggtggctcatgcctgtaatcccagcactttgggagaccaaggtaggcggatcacaaggtcaggagttcgagaccaccctggccaacattgtgaaactccgtctctactaaaaatacaaaaaaatttagccaggcgtggtggcgcatgcctgtaatcccagccactcgggaggctaaggcaggagaattgcttgaacccaggaggtggaggttgcagtcagccgagatggcgccactgcactccagcctggcaacagagagagactccatctcaaaataaataaataaataaataaataaataaataagaaggacctttagatcctgagacagaacttagggggaataaaaagggtctgactcctttcacctgctgcacaaaattctgtgtttattcatctgctttccttccagtagataaatatatatgctggaaaaaagactggaaggatatccaacaaaaagcatcatccctaggtgttgggattacccctgacatttacatgtgctttctgtataacaactgtataaaaaccaccactcatccaagatggcaaaggctagcccctcttcttcccctctttggaaagcttctctatttcacaaggccaaccactaatctagaaatccttcaaatggaagggaaggctaatgaaggtgttaatttgaagaaaaaaataaggtcaaaacaaatttttaaatgctcaacctcctaggcaaacaacctgcatgcagtttggtcttaaagatcttaagttcgccgggcgcgatggctcacacctgtaatcccagcactttgggaggctgaggtgggtggatcacgaggtcaggagatcaagaccatcctggctaacacagtgaaaccccgtctcaactaaaaaatacaaaaaaaattagccgggcgtggtggtaggcgcctatagtcccagctactcgggaggctgaggcaggagaatggcgtgaacccgggaggcggagcttgcagtgagccaagattgcgccactgcactccagcctgggtgacagagcgagactctgtctcaaaaaaaaaaaaaaaaaaaaaaaaaaatcttaagtccatcacccagttaagagccatggggctccgagcaaacttcataggttgaatcccagccttgccgtttcccagcaaactcaggcagggcgcgctcccctctctaggcctgtatcctctcctacatagagcaagtgcctcacagggctactacaaggaccaaggaaactgctgcattcccagtgctggccacaggaccacaccatactgttagctaattattaccgcctttcccacaaatacagaaaaacaattaatgaaacacgcaagataccaagaacaccgcaaacctgcaacaacagttccccatcttccaccaatacagacatttttttcttagcaatgctgatgggatgtgtctttttgaagttgctgattaaattagagggctcaccgccccccccacccccctcctccaagttcatgaaggctcatctgacactcattactcaggggcctactgatttcaatctggggccaggtgcagtggctcacacctataatcccagtcttttgtggggccaaggtgggaaaattgcttgaggccagggtggaaaccaacctgagcaaaagagcaagaccctgtctctatcaaaaatttaaaaattacctgggagtggtagcccacacctgtagccccagctactagggaggctgaggtgggaggttcacttgggcttgggaagtcgaggctgtaatgagccatgactgcatcaatgcactccagcctgggtgacccgtctcaaaaagtaaaatgttttttaaaaataataattccaattaaaaataataattccaatttggccatgatgtaaattggtaattacatcttcaaaaacccagttcaactatgtccacagacatgtttaccctctaaactgcgttgacaacgtaaacttaaggcagacactcagccttctgagacactgccatgatcagatacaacacggaaatctaccttctcaaaagagaagcctacaattgtgttaaaaatataaacaacccacacctcccttgaaagatctgtccctacctccattttgattaaagatataaatcacccctttataaaaatagaacctcagacccatggttcccaactactacgccaaggtacgccaaggtaccccaaggtgccaccgtgaactcacagggtgccaccgtgaactcacagggtgccaccgtgagaactcacagggtggcactgtgaactcacagggtgccttggaatatttttaattttgaggtaaacacagcaatgcttttgccatctgtcagacacagcaccaactgctcactcaaggtcattcactgcaacactagaccaggctaaattcctttggatgatgctttatctttgaaaaactgggtgtatgacagttgctgtgattaataagtgagaactgcatgaaaatcaacgtggatgaggaaatgattccaaggtctgagaggctgtacaagggaccagaatatggaaaatgacattttgtgtatactgttttttcaaaaggctaatcagttatcaggaaacaaatacatgctgaggatcaactgtatccacttcttaaagacatgggctacttcgttaaatagctttacacagaaagctgaagactggcagggcgtggtggctcacacctgtaatcctagcactttgagaggccaaggcgggcaaatcatgtgaactcaggagtttgagaccagccttggtaacatggcgaaaccgcgtctctataaaaagtagcctggctgggtggtgtacgcctgcagtagtcccagttacttgggaggctgaagtaggagaatcacttgaacccggaaggtggaggctgcagtgccactgcactccagcctaggcaacagagtgagtccctgtctccaaaaaataaataaataaaagctgaatattaaagtggcagcagaacacaaaaatcagctgagactccagcaggaagctggcaaggctgcgtgggtacaggtggggacagatgcgtgtttttcaaggcccatggtggctgcccgtgccctcctcccagggattccaagaggaggtttgaaaattcactttacttttcaattttgatctccacagaatgatgtctgtcgacactcgataatttttccttcttcacttcgcactcttttctgtcggaaagctttttcccagcaggctcatttttggcctaaaatataatagacagaaatgatgtgtggcccagagcttctcacttgcaaactccatttgcgagttaccatagacgagaactgcctcaccttctctacggagatcattcgtccatgcagctcagttctgtggagatggctgatgcacttggtcgcctcgtcagatgtcgacatggtgacgaatccatagcatcgagcccccgggctgcgggcgttcgttaccactttggccccgacaaccttcatgaaaaagggcactcttactctctcatacaaatgaccacacaacttgctaaagttattacctggcaatcagaatcattttcactatttgtcacctctccccatatggtagttttccattttagttactgaattggttctaattaatcctgacctatccaaatacaattgctttttttttttttgagacagtttcgctctgtcacccaggctggagtgcagtgtcgcgatctcggctcaccgcgacctccgcctcctgggttcaagcaattctcccgcctcagcctccgaagtagctgggattacaggcgcccgccaccacgcctggctaatttttgtgtttttagtagagatggggtttctccatgttggccaggctggtctccaactcctgacctcaagtgatctacccaagtcggcctcccaaagtgctgggattacaggcatgagacaccgcacccagccactaaatacaactgcttttaatacaagataagtcatcacaaggaaaacacacaaacatgcaaggttataaaaccattaaacttcattactcacaactaataaccagaagtcctacccatccacattgttttctctatttccactgtgcccacaaacagctgtggggctactaagaaatgcacccatccactccagctgggcctgagaagagctctgacacagacatggactgtcagaaatgtccccatggggaaaggacttccacttctggctgagatgggagaactaagcattgtcttcctgcctgaaacaactaacaaatgtgatgaaacgtaggcaacgacagttttcagatcctggacatcaggctgcccaagacaacaatccctgagagctccctgactgcccctgctcactgcctagattcccaggcaatgggggatgggtaagacagcactgagattctgagaccaagacagagagaaatcacggaactgagtatcagagaggacacagccacacagagccacgcagagcaagctgaagagacccacagagggttcctcccacccagtgcacacgtgtgcgaggaaaccagaggctgggacagcaccacccataaggagcagagggaacaatcaggagcagagggaacaaccactggaggggcactcagggccacaaatggtttgctcttcccaatagccagggtggaaaggctggtaattcacgggccatcagacccactactcagagggcactgcccagtggtgagacaaaatcagcccaaactgaaggctactttggccctgccttagtgtgtgtccagtacctcagctgtgtcccagaaaaaagctcaagggtatttgtagagatacaagtataactagcacccaaaaaatacaattcacaacatccagtaaaaaattaccaggcacaggctgggcacagtggctcatgcctgtaatcccagcactttgtgaggccaaggcaggtagatcacttgaggccaggtgttcaaaaccagcctgggcaacacagagaaaccacatctgtaccaaaaattttaaaaattagctgggtgtagtggtacatgcctgtggtctcagctactcaggaggctgaggtgagaggatcgcttgagcccgggagctcgaggctgcagtgagcaccactgtactccagcctgggtgacacagtgagatcctgtctctaagggaaaacaaaacaaaacaaaaaaaccagaagaaacttaaaagcagccacagaaaaagagagagaaaagacacaaattggtaactgaaggaacaaagattaaattaacctagaattctatacccagtgaaaatttatttcaaaatgaagacaaagtaaagactttttctgacatgcaaaagaaacaagaacgtatcaccagcaaacctgcactacaggaaacattcaattccttcaggagggaggaagatgatctccgatgggaacttggatatacaacaaaaagcaacgaagagcacctggtgaggtgaacatgattttttcctgtcatttctgggtctctttaaaatataactgtttggctgggcgtggtggctcacgcctgtaatctcagcactttgggaggccgaggtgggaggatcacgaggtcaggagatcaagaccatcctgactaacacagtgaaaccccatctctacttaaaatacaaaaaattagccaggcctggtggcgggcacctgtagttccagctacttgggaggctgaggcaggagaatggcatgaacccaggaggcagagcttgcagtgagccgagatcgcgccactgcactccagcctaggcgacagagcgagactccgtctcaaaaacaaacaaaaacaaaaacaaaaacaaaaaaaaacacaactgttcaaagcaaaaaagccaaaccacaacaagtcaaagccaataaaatattgggtgacttcttaaagagaagtaaaccgtatgacaataacatcacaaagatcgacgggaggggaaatgcaagtatattcccacagagttcttgcactacgctgaaaccaacagagcaccccttgcagacagactgtaagggaagatgtgtactgtaatcctacagtaaaccacaatgacacagagttagagcaaataagccatcagtcataaaaaggactcgacccacaagaaggcagataaatgggaaaaagagatcaataaacaaacatgaacagaaaatagagaacaagacagtagatctaacgccaagcccaccaccactggcgcgcagagtaaacatttccccgggacacaggagtcctggtctctgccctatctctgactcagggcatcaacctaagcaaggcattccccgtctctggacctcatggccccaactgtgaaatgacaaggtggaacccacaagcttgaggttcccatctgacgtccttggttttgaccacacaaatggaggagtcaaggctctgcctgaatctgtccagggccaaagggacagaagactctcctgagagaaacacagatgccacttcccattctaccttcccatcaaattaatcatccttacaagtatatctcttctgatgacagacaaaacccaaatgagagcaggcaccatactaagcttgtatgtccctatccctgagctatgccatccgccctggaggctctgcatacttcagtcaagtagctgagtggtgtcctgcccctctggccttcctacgtccttctgtttttgtccagagctgagccccacaggtaaggccaactctgtcactcacgcctcagctgaatgtcacttcttcagcgagctctgctgaagctgcctcccaaatctaaacacggcctccccaacacactgacggcgtgctctaatattccttaatacgctcatcacaacacatcatatgtgtttatttcttaaatggtctttttcccgccagactaaaaaatctgtgatgacagtgaccacgtatgtttacctctgcttaatcatcagtgtccgagtgaagtcaacaaagtaactgaataaacaggttattcatggctataagaatttcctaagcccttgctgaacacacagactgttcagagaaaaattgaacagcacgctttctccgggtcctgtccgcttcttaagcaatgaaacattaaccaacacctgatcgggtgacacagacctagacaaaggaacggcttctgtagccagaaaactgtgtcagacagggcccactctgcctggaatcagggcaccctccagacactaaatggtccgaaccttgtcccttggaagccactccccagaggcacccaggagaccagggcagtgccaattgcttaccagaagactcttggctaggcgcggtggctcacgcctgtaatcccagcattttgggaggccaagcaggcagatcacataggtcaggagttggagaccagtctggccaacatggcgaaaccccatctctactgaaaatacaaaaattagccaggcatggtggtgggtgcctgtaatcccagctactcgagaagctaaggcacgagaatcacttgaacctgggagggaggcggaggctgcagtgagccaagatcacaccactgcacttcagcctgggcaacagagcgagacgcagtctcaaaaaaaaaaaaaaaaaaaaaaagaacaacaaacaaacaaaaaaagaagactcttaattaatttcaaacagtggaatcattttaaattgtcctcaccttcctttggaaagctgctgaattgtactatttttctcccacccccatgagcagcatcttagtgatttatttttgaaccacgatcatgttctagttatgagactatatacttaaaatgctaaatgatatgaaagtcaattattcacttcattctttttttttttttttttttttatgacatagtctcgctctgttacccaggctggagtgcagtggcacaatcttggctcactgcaacctctgcctcctgggttcaagtgattctcccacctcagcttcccgagtagctgcgactacaggcacagaacaccacggctggctgatttttgtatttttagcagagacagggtttcgccatgttggccaggctggtctccaactcctgactttaggtgatacgcccgcctcggcctcccaaattattcttaagggaaaaatctcatcatgtaagctttaagttttgcacaagacaaaagaccaccagtctctttgagaccagttagaaagaaccccaagaacattgagagagaagctgtttatacagctgttctgagcactgttgtgatatgaccaaccacctgccctgctccgcaccctagttactgtgagtcaggaaacaaggtgcactgcacaagactgggcgagcttcgctgctgtcgttccattttttagtaaacacaacatcttgctatgttgcccaggctggtcttgaactcctgggctcaagcaatcctcctgcctcagcctcccaaactgctgggattatagacgtgaaccaccgtgcccagcagagcttcctttttaactctgaatcacagtggatggtatgaggcaagggaaggcataccttcccatacttgctgaaaaggttcttgagatccgtagcgcgtgttgtggaggacagcccgctgacccacaggttccgaccagaaccgctgccgacccgacctggcacgagagggagattcttaggcatcaccccaaggcctaacaggaagcacaaccattcttaagaccgcagccctctttaaaaaccctaacgacgcccaatcccaactgctgacttaagaatttaacgcacacacacatgccaacacacagaaggctgaaaatctggacagcaaaaactgagtttccttactcaaggaataatcatgcccatgtcagttatgaactgaaatgtcttttgatgatcagatctcatccaagacggcagtctctaaaatccttgaaacagtcttcaatgagcagaattattcctttcttgtaatgtgcttttcaccatcccatagatgacaaccacaagagaaacataaaatgcaggtgcttgcgaacttctaaaactagtctctcaagaaaccattaggtggttgattccggtaacccataacaaaacaaattactgaatccaaagtgtgtatatctccaggcccctcctcccaaaataagggaaccatacctggctccctaccacgttaaattaaatcatacctttttcatctttaatgattggctttatatctttttcttccttaaaagagctagagacaaaagttaatgttactcatacaggaaaaaaacgaaagagaacaaaactaaaaatatgattatgtgctaaaactgaatacctaccagaaaattagtctgaaataaaattttaacagacacctctgcaagcttatattggaaaatctgaccccaaaaatacaatgtcagatttgtaaaagtcaattcgatttagctgaagataacaattaacaatttaagaacacaaccatggtaggttgagaaaaagaaaaggaattgaatcacccattaaaaacacacaaagagaaacgaaacattctttagaagcaaaactacaatttcgtcagtctggctggccaattgcagaaaaaaacagcttatgtgtgtcattacatgaccaatgaaaaggagatagcgtctggtctaaaactgagaaaaaacaaacctcattttctgatcagcgccctcactggttgaggactctttaggagccggagggacttcattacaagcgtcaaaatcaaacttcctcccgtcttctttgctatctctggcttctgggcttggggcttccgtgggtgcttctgcgagctcctcgctagaggcctccgcgagctcggaggccgcactactctgctcaactgccggctctagccctacaggctcacagtccgtcctctcgccatcgcctggctgctccgcgggctcccttttcactaccgctaacaggctgtctgccttgctcgactgagcgtgtgctgttgactcgctggccaaatctaaatcaccctcttccggatgggcgctgtcaaataggtcctcttcctccgcaagctttctgtctggccccacgctacttgtgtcctgtgcaaatggctgctccagctcggaactttcttcttttactggctcagatttacaagtttcccccaaaatgtcgagtattttctcattttctacggatttaacaggaatagaatggcacaaggtttaattaccagggaaataaagcaatcacaaatgtggaactggcacggctgccacactaacacgaagagaactgctagctacacagagattggaaaacccgcgggtacacaaagttatactggttacactacctgcgccgcgaccgcctctaggtaagcctctacgctacacggaagagaaaaggcccccacagatttaaacacctacaaccacgcggctggttctcaatagtcttcttcgagtttttgttcaagtctgggtcttctgactgattttccaatgtccaaggtgctgaaccgaatgcaatcaccattcaatgacagctcaacttccaaatttctttgaatttcttttaacagaacaatccaatatgaaaatcagaatctcttctgacggtgggagataaacgcagtccggaaggggaataatatgttgaaaattttcacggagaaactctgtttcctcttctggaatccagtcacttctcaggtggtaagtgccctgacaacagctttatcctgccttaactgcgttaatcaaaatgactgcagcaaaatatcacaagatctgtttcatgtgtagaaacacatggaggaatcacggggacgggggaattaaatgccactctacgtggttagacatgaaaagaatcactactacattgcaccaaatgtatttgacctcaagaagccagaatggctcttccacagatctggtgatacgaatgggtttccaatctctgatccttgtatgatctggattgtccaccattagagcaatttacaagatcataacacagcttaaaatatagacagctttaaaataatagtgtgaaaactttcaaaccataactgtcgtgtttctcttatcagtacctggctccaaaagggattcttcaatgtcctatttaaaaaagaaaaagcaaatccacaagtcactttaaacacggggcacatacatttcaccagtaaatatggctttcaatcatctgtgaataaatgcctgtttccacaaaactttcttgtctccaaaaaatgtattccatcctacaataacctgatgaaaaccagctcattttaacagtttccctggtaacagcaggtccctagtgataacagtctgtcccattctcccgagtttgggccctgccctgccatgccacccaccccatgaccaagctgacctagtggctgctgcagctggcaaacaccccctttgtcagagaagaggtcacagtggatttaagaaaaaaatacttctcccaacataaactgatttgtaactgaaacctgtcataacaaaatgatctctctactctgctgaaaaccttttccgacatctgtctcacttaggacaataggtccaatccttctggtggcccagactcagcgaggcgggcccagctgctctgcaacacctctggcttctatccaaccctgtgtgctcccctctctcttttgcatcagagacaccacccaaactttctgctccaaattcttctttccctcttcaacctatccgtcagacctctgggaagagttccaggcacttatgaagtccaaccaccagaactgctccctcatcacacttctttctcccttctggttacatatttggtttgatcccactgcccctgctagatggccagccctgagactgtttctcttctgctaacctcttaaccccagcatccagcacagtatccagtcatttccatacacatacacactgctctttcattatggaaaatcaaccactcgattaacatttccagcgatgcagaaccagatggtaacttaccggagttactttgaagttcaacgatgaagtttccaaagtgttcttaaatccttccccatccacctgaaaaacaaaatggaagatgacttcgtggaggctggagctatgaaaaccaaggctgacacctcgcttaggcaacttgtgtgtctatttccctcacggcaccttttgccatctgcaagtctactgttgggtcattcagttcagcacctgcctctccgccagaacacacactccacgactctgctccaccagcgtctctggcagtggcctgcaggtgggtatgccctgtctgtactgggtgaatgaacgaatgaatttcccaggcagtttctaagtactggtgattaccacatacccctccaatcacaggatttccaaagcagaactcaaaatgataaaatgcacccctccaatttcacctggtagcaatactcttaaggtaacactaaccgggcactttctcctagcctactttattcattcattcattcactcattcatttgagacggagtgtcactccttttgcccaggctggagtgcaatggcgccatctcggctcattgcaacctccacctcctgggttcaagcaattctcctgcctcagcctcccgaggagctaggattacaggcatgcaccaccacgcccggctaattttttgtatgttttagtagagacggggtttcaccatgtccaggctggtcttgaactcctgacctcaggtgatccgcccacctcagcctcccggagtgttgggattacaggtgtgagccaccgcgcctggcccgcctagcctactttattaaaaacaaacatctaacttggtcaatttctctctttactacatgccaaacaaaagaaaaactgttaacaccaagttttactaaatctgaagctctttttaagtgaactacaaaaacagcactcccaaatattttcttttttccttttctcgatttgaactcatgacctgggatgcctccattaactgagaagtacacactctgaaaacaataagcacacagcagtaccagactgagaaaggcggctaaccagttgctcagtgctgccctaggtcaaaggatggtaaatttggaggcaatgacttttgaccgtaaggtttaaggttcagtcctatggaggcatttccacccccaagctgaaagctgcaatgccttaaggaaacaaaacaacctactgggcacgtgacatcagtcagagtacaatgaagatcagctcgaagacactgacagcttgtgatatttgaacagcctcaccagagagctctacgccaaaacactagaagtgaaaagctgggaaagccctaacagagcaaagttcctcctttacatacaaggatgctcacagtcagtccttttggggagcagggttgatacttgtcttcactgtactttacatcttttaatgtaactgcttaaccttgcttaaaacaacattaacaggctaggcgtggtgactcaccactataatcccagcactttgggaggccgaggcaggcagatcacttgaggtcaggagttcgagaccagctcagccaacatgatgaaaccctatctctaccaaaaatataaaaaattagtcaagtggctgggcgcagtggctcaagcctgtaatcccagcactttgggaggccaaggcgggcagatcacgacgtcaggagatggagaccatcatggccaacatggtgaaaccccatctctactaaaaatataaaaaaatcagctgggcgtggtggcgcatgcctctggtcccagctcctcaggaggctgaggcaggagaattgcttgaatcagggaggcggaggttgcagtgagccataatcttgccactgcactccagcctgggtgactgagagagactctgtctcaaaaacaaacaaacaaacaaaacacaacattaggaggaatatctacatgatgagattagaaaccatttttgagctgggcacggtggaccacacctataatcccagcactctgggaggctgaggcgggaggattgcttgagctcaggggttcaagatcaacctgggtaacctagtgagatcccgcctctaaaaaaaaaaaaatttttttttaattagctgggcgtggtggttcactgtgtagtctcagttatgcagggggattgcttgaacctgggaggctgaggctgcagtgaattatgatgaccccactgcactccagcctgcacaacagagcaagaccctgtctctaaataaataaaccatctttgcttcttaaaactgtattttaaaaggaaaaaactaaatgggcactgtggcctgtgccaataagcccaggtagtcaggaggatcgctggagcccaagagttcaagaccggcctgggtaacagttgagacctcatctcagaaaagaaaaatcttttatgtcagagctttctattttatgactcaccacatgcttcgaattataaaaacactccccagtgctacagaaaagctatctatgagtaaatccctgagctacacagcgtttaaatggacatggtttaacaccagggtgtagaagcagaactgtgtgttcatggcggtttagctgtgttctccctcacacgagcagcacgcgagcaccaggtgcctcggggctatgggcacatcctgccgtgtctccaagttacctacagcatgctctgggggctgagccgggagctgtctcagctgtgcagccacgtattctttactatcacaaaaggaatcgagaaggccgtccgtgccatcctccccaaaatctggagcactgctattcgccacttcagtttcgtctagcacactcatgtccatcatgcccatattctgcaggttctccagacttgcttccatgtcctcctgtaaagaggaagaagaatcgttaacgaccacctggaccaggacagggagctgctgcttgtcatctctaccctgacatcacttacctgcccgtctctggaatcgtcttccaggccattatcttctgtgccttcctcctccatcttcagtcctaattacagaataattgttcaatcagataacactcaagttctacctcataattagtttatgcagaatagatttcaatcttagaacagaacacattacaagataaactataagtctcccctctcctgtcacacgtaattttgtctcaatttgttttcttttttttttttttttttttttttttgagatggagtctccctgtgtcacccaggctggagtgcagcggcacaatctcggctcactgcaatctccacctcctgggttcaagcgattctcctgcctcagcctcctcagcagctgggactacaggcgtgcatcaccatgcccagcttatttttgtatttttagtagagatggggtttcaccatattggccaggctggtctcaaactcctgacctcgtgatccaccagcctcggtctcccaaagtgctgggattacaggcatgagccatggtgcccggcctcaattggtgttctaagtaagccatcaacagggagatgaaaatctaggattcctcttagattcagagtactctgattttccacaaaatatctaaaagtttccaaatatttcaaaaacactccaaacctaagaaaaaaaatcacaaaaaaatgagcaaaggataaaaacaggcattttcaacaaaccaacaaaaaaatgcaatacccatctagtaaccaaagaactgcaacataaaataacatattgagttagtgatttgctggctctccctatattccacccatttcaagtaggtctttgtcattttttagctcaagaacttttttttttcccccaaggcaaaaaggcaaaggctgccataaagtcgagaatcatcctgggttttgtgaccacaaaataactatttgatagaattctgctaggaattgcaaaaggaggccagaggagttcaagagtggaaaccttgagaagaaacttgaggctctatatgtatcaaaaaccttacaaatgtgcataccctttgttccaggaatttgagtcttaggatatctgacaaggagttcaaaacatagatatctgtcctattatacctgttaaacacccaaaagggaaacaaattacagcatattttcattcagatatggttcacaaccggggggaatggctggcaatgtctggagacattgttagtggtcatgacctgggggaacgccattagcatcagtagctagtgatgctggtcacgaccctgcaatgcacaggatactccccaaccccagagaattcttcggcccaaattgtcaacagtgccaatgctgagaaaccctgtgggacaccatccaatgtctcacaatatttaaagaatgtatgcttttaaagaatatttaatgaaacagaaaaaatgcccacagtgtaggcacagtggttcacgcctgtaatcccagcattttgggaggctaaggcaggtggctcgcttgagcctaggaattaagagacaagttcgggcaacaaagtgagacccccatctccaccaaaaatacaaaaattagccaggcatggtgttatgtacctgtactctgaattaccggtgagaatgaggtgggaggatgctccgagcctgagagcttgaggctgccacgatcatgccactgccctccgctctgggcaacagagtaagaccgagtctctctaacatacacaccgataaagaaaaatcaaacagaaaaaaatacatactttcccgtctctactaaaaatagaaaaacagccggacgtggtggcgggcgcctgtagtctcagctactcgggaggctgaggcaggagaatggcctgaagccgggaggcggagcttgcagtgagccgagattgcaccactgtactccagcctgggcaacagagcgagactccgtctcaaaaaaaaaagaaagaaaattaaacataaaaaacctgcagggtctacacctcaagagtctcactcaccactattatcaataatcactcaagaaatgcagtttaattgcatgtctcgcaacgtgagctttttccagtctatcatttaagacgcctaacaacgctagcaggttttattatctgcatttgacacgagaatttggttgagctccaaagctggcactctaaaactcagctgtcccacttcgcattatatctaaacacagcatatccttttgaaatacgttgtctaaaaatgtttggtaattgcacccaatttctaggcccctaaatagtagcctgcagtgcccacataggccggaaataggagaaatgctgaccaaaaagcatcacagaaaagctaatgtggcgcagacaggcgacgccccaatccccggcacctggcattggccaacgaaaagctgccgctgctggggacacagatgtaagaaaatccaactttaatcccacatggcatctaaaacttaaatttttaatccaagttttattttttccaaacccacctacaatgttgcctaggactcctaatcttggtgaagacccttactctgatttataatgaggacacttttccctcaacaagtttggctacttcagtttttgcaaggaagcagttactggtgagttcccagaatgagtccaactttggactcaactgaacactgctgcatagtgcttgaaacgaaaattaactggtgaattcctcctgatctaacagttgtatgtaatcacaggccctaactgcaaccacaaagtcctaaggct

SEQ ID NO: 307 - DNA, 104 bp, Homo sapiens
ccagcactttgggaggccgaggtgggcggatcacttgaggtcaggagttcgagaccagcctggccaacatggtggaaccccgtctctactaaaaatacaaaaat

SEQ ID NO: 308 - DNA, 3345 bp, Homo sapiens
gagcctgataaaaccggcccggttctgtggaaagtgggcggcggagccagggtccctggaatggcggagactctgtcaggcctaggtgattctggagcggcgggcgcggcggctctgagctccgcctcgtcagagaccgggacgcggcgcctcagcgacctgcgagtgatcgatctgcgggcggagctgaggaaacggaatgtggactcgagcggcaacaagagcgttttgatggagcggctgaagaaggtggatttggggccccgagggcgggcacagggtgggtctggggtcctcttggccgcgacggtggctcgcgggccctggcgtccgcccccggccgcgttcgcggcctcgccggacctggcgctctcgcgtcccccggctcctccgaggccccggagagagttccttggccggctgggcctgggttcaaatcctaacgccgcaatggggccaggagaaccacaaaaacggcacgcgtgcaggagaaacggtgacgggtgacatcgtccactgagaggagggttctcccctcgtctcgtcccctcctccgtacctggaggggagaccctgaaaccctcacttcccaggcgaggggaagggactcggccaaggtcacacggccgaggacgggcagcgtcgggatttgaacccaggccctgggattcctgattcggctgcttggtttccccagggaagatgctttgtgacccacaggggaccgaccagcctgaatcggggctgatttacaaaggaaacacccgtaggacatactcaaagggaaaaatagaaaaaaacccaccacaatccagttttcacggtttgccggtactcgctcggtgaagtaacgtggcaggaaggaaaagtggtgttgacggtagtgatcagaaatgtgaaatgaggggagaccccgggtggactttaaaaccagcctcagaactgcccgggaggcgggcagagcctgggctcccccagctccgtcagtctctctggacttggggaccctgccagctctcggtggcctgatcttgggcataggagaccttgaaccccttctgagtcctcttttctattctttttttttttttttctcctgtaagaagcaaaaaagcaataggactttgatttggggattaaataagtttgcgtggagcaggcttggcgtgctgcctggcgcatgtaaacactcggtgtgtggttgccatcacgattcgcttttcctctctgtgccaccacgagtcctcatttgcagatcgggggctctaacgcctcccttgggggattcaaagggatccctaggaaaagcagagaggcaagtaaaggttagccacctgcggtttccttattcctgtagctttttttctctgccttttttccacctggctactctgggacctctcccctgtagttgctccgcctggccgcccaccccccagcccctgcaggcagtggggctgttgacacatcccaccatcctgactccggaactacggagatcacagggctttattattaattggtgatgagaagaagtagggatttttttttttttttttttcctgatgagaaaccctgggctcaagggtggatagttgtctcggccagagtcacatgggccttttaaaagctcaagcttgtgtttcttttcactatggattctctttactcagataaggcaggaagcccactgatctacatatttacccagagaaaatgcagagagtggagattggcggctggtcaggtgtggtgccccgccaccagggcctcccatcagctaagccaaattaagaggctttatcctttttttctccctggacggtccataggcctgaaaagctgctgtgatcttcctgtcaagctggtgactgagacttcccatcactcgctgtcatctctgagagcacagatttgttccttcttccttctccttttcattttcttcaagatgtggtcccaaaacacgaataccgccagcccatatccctgtctgccactcacccaagccagtctggagttcctgatctcattctcttcccgtttctgtcatcctgttggtgtccctttcttggtttatttttccaggaagggcaaaagaacaaaaaggggaaacaggacacctgcctagggcattgcttctcttctcctggtggtgtttcagaattgcctgtccccgggaaaagggtgagggacttggtgattgtacttttccttgatcccaggaaagaacttcagtcccttttctggcttctgagaggagagatttttgttgctgctggtaaagatgagatgtggaacccccaggccctatctcaattcagacttacccacctgggaaacttggaggcttccaaacctctgcagataaaacatagtacatgaaatgatgtaaacaaaacttgtgctcatgggactggagagtaaagactggaaaagttatcagtaaaacttgacctgaagctaagtttctagggacgtcatcgtgattgacgtgttcggtactgatggcttagttgatgccaggcactgtgctgaggatgggcatagttgaagtgagtgacagagtcctggggtgggaggctgggcgtgccaagaaattcttataattcaatatccgatgaggcacaatcacctagtggttgagaatgaggtactggagtcggttgtgaatgtacatgatggggatcggatgaggtcatgcatgtcgtgacgggtctcgtgcgtaacacatagtaggatcccagtcagcgagcattagtattctgtccacacagtactgagtacaggcacggcgtggagggagtccctggagggttaaagagtattttgtgagtaaagtcaggggaaatggagagtgtgcctttccctttttgagttcttctgggcttaggaaggagatgaaccagataagcctactgtttgttgagtgcttccttttcatggctagtagagtcctcacaacagccttccagggtaagtactgtattattattagccgcatgttccagaggaagaagcaaaaactgagcacctaagtaaacctgcctgggaccacccagctaagaactggtggcgtcagtcggtctccagtgtagagcgagataacagatgagtggatgggccacaggtcctgggtggtgagggcggcagcagctttttgatcttaaaaatacagtttccttgtcacctgagagctctctgaaagcagtgtgtgagctgactttttggatcaactttacttttcccttctttttaggcaattgaagatgaaggtggtaatcctgacgaaattgaaattacctccgagggaaacaagaaaacatcaaagaggtctagcaaagg

SEQ ID NO: 309 - DNA, 5591 bp, Homo sapiens
cggacccgagtacctcacgcaagatggcggagctggaggaggtgactctggacgggaagcctcttcaggcgctgcgggtgaccgacctgaaggccgcactggagcagcgaggcctagccaagagcgggcagaagagtgccctggtcaagcggctcaaaggggtgaggagtcggcgttgctggggtgtcggaggagagcggacccggtagagacgagcctctgccgcggcgcaggcgcagtatccgggctcggcgcgagctcgctcaggccgccagcgcgagcctctggatccgcgcgcacggtggttgatgaggttcgcgctggaatggagatcgcgccggttcccgccttaacggcagcagcgcgagcccaaatgggagggtgtgcactactctccaggagtgtcttaagctccttcctccttcccccaccccctccttgtttgtatctgtggtttcggcgcatgcgctgcagaaggagttaaatcccactacaacctacggcgttgctggcctgaggggggcgagttgggctgggtcggagttaggggtatagttgcgcgaaggggtggatggggttggtatcggtatctgcacgaataggactggggtagggtaaaatgtctgctcgattagatgaggaggtgagatgaagagagacctttatttgaagggacttgatgagagagaggtctctaatttagtggcatctagtggcaatttgggtggttaagagtttggtgaatattggtgagagaggcgaggcaggttgatatatattggggattttgaatcggtttgagtagattaaggtgggattgtcatgaggtaggtgtagctcgattcaagtgtataggtttggtttaaagaagggaagatgaggatgtcttggttttaattagagttcaacaggatacgtggcaggtagtgcagattaggtctgggttggctccagggttgagttggcagaccgttgcttatacagaagctgatagttttgtgtgtgtgtgtttgtgtgtgtgtgtttgtgtggatagactaggttagaccacagtttacagggtctgtggtcattttcttctgtagcttcctctttgaaaattttataaatttgataaatctaggtgccacagtactggaaattatacaaattgaccctggtactgggtaaccctttgaccaagtaattccgtcaggcaaaaaccaggagccccatggctggtttgagtattttaagtaattttacatgcatgatcagatttagaaggggcacttggcgaaagtgcagaagataatagggattttagtactggttctattactgatattatgacatagccaggtcactgattctgtgtgcctgcattttatatctgtacatttagtaacagtaaccatggctacctttatgggtcttctgaagatgaatgagaacagtgttagtaaagggttttcaggtccctggaaaaggaatacagtttaattgtgtgtatttaagtcattgcgtttaatttagaggttgtggtagaggtgggggtttgtttttcttttttttcctcatcatttctgacttttacccttctctataccaggctctaatgctagaaaatttacagaaacactcaacaccccatgctgcattccagccaaattcccaggtgagaaagaaggtgtattcaatggagtgggccctttggatatccagacacatggaaggacgtggtgttgtatatttgatgcttaagtcctcatgactgttttcctaagttctcttagtcagaaatgttctcaaaccaggacagttgaattctaatcaacccagttgtatacaagggcctggagtaaagaacagaatcagaggcactgttagtttataataattgaaatggcatgtgtagaaaggtgtggcttccattaattacgtgtagtacagagatctgaagtcatttatctgccatgaatttaggaaaggtagttgatgtctttgagtatagatatgaagtagatcaccaatatggcagtgtagggaaatagttgctgattaagaactcttgttgatgtagattttccaagggttcaatcctgtgtaagtcacccaccattactagtgttaactactaactcagtgcacttactcataaacattactaatacctctttacttaggataagaaacaacctttggaggccttggtcttctccatttccttatctgtaatatgagaaacagactaaacccatgggtttataactgttctcttagggttttgtggagctgctttggggagcttcctaggggaaatacctttttcccaagtaagcaaggctcatactcctctcttaaactagattagatctactttttaactattgagtttctgcataaaatttttaaattattccacagttaaaatccaaaaattattaggctgcacagtctcttaaagtttctttcagcttttaaaaatcccctcattataatgtgtcatatacttaaaggaaaaatccaagtctttgttaaagcaatagtgtgcagcctcagtactagatgaagtctcaggatactgtggaaaacaagagagccctcctcctcctttgttatcacctcattaagctgtaagtatcataatctagccagcattcagaggttcaattaagtactttaacaagcataagaaactgcataagttaatcagcttaattgtattccttttgcccattgcatgttagtctttgaagctttgcttttattaacaccgggtttgtgcagcaaacatgcctattctgtaatacacatgcaacccacccttcaacaatgtccattgagtgccaagagactcatttctactttaggtgaaaataaacctttactatgtttaggaaacatgactaataacatagaaagtattcaggtttttttgctttttcagttctaaataggacttgctaagcaagaaggttctagggaggagaacttgtgaagagaaagctggaggtcagaagggcaacttgggaatctgtattacaaaaaaaaaaaaataggaaaaggcataagctcctgttaccaaggatttcctttcacccagacaaaatggagttataactttgtctaaatgctgaatggatatcccttttcttagtctcttgatttcatacttttaaatactatacttgaattttggagttgtttgataaaatgtttcctggatatgaggccgggcattgtggctcacgcctgtaatgctagcactttgggaggccaaggcgggtagatcacctgaggtcaggagtttgagaccagcctggccaacatggcaaaaccccgtctatactaaaaatgcaaaaatgagctggttgtggtggcacatgtctgtaatcccagctactcaggagactgaggcaggagaatgtcttgaacccaggaggcggaggttgcagcaagccaagatcgcgccattgctctccagcctggatgacagtgatagtccgtctcaaaaaaaaaaaaaaaaatgtttcctggataggtaacggttgatcttttggaggaactggcttttttttttttttttcttgagatggagtcttgctctttaacccaggctggagtgcagtggcacgatctcagttcactgcacccaccacctcctgagtagccaggatgacagactcacaccacaatatgcccacctttttgtatttttggtagagacgggttttgccatgttgctgagactgatcttgaactcctgagctcaagcagtcttcccacttcagcctcccaaagtactgggattacagacgtgagcccccatgtttcagtcttgatactaccaaaaggaaattttagattaccctttagataatgttccacgtaatctaggaatttagcctaaaagatataattacaggaattttaatttaaggttatttgtggctgggcacggtggctcacacttgtaatcccagcactttgggaggctgaggcgggtggatcacttgaggtcaggagtttgagacccgtctgaccaacatagtgaaaccccgtctctactaaaaatacaaaaatcagccgagtgtggtggtgcacacctgtaatcccagctactcaggaggctgaggcaggagaatcatttgaagccaggaggcagaggttgcagtgagggaagatcacgccactgcactccagcctgggcaacagagtgaaactctgtctcaaaaaataaaaataaagaatagtaatttgtataccagtatcactctttgggaactgaatatttaaatcaaaaacttatgtgcagctcttctttttgccctttttttgtgtgtgactcaaggctattctgttcttcaatatagaactaacttagaaaaaagccttccaacattttagttatctttcttgggcgcaactataaggagtggacctttgctccatggaatgttcttctttgcattctcctggtttgttttcctagaccctctgttttcatttcctctacacagattggtgaggaaatgagccagaacagtttcataaaacagtatctggaaaagcagcaggagctacttaggcagcgtctggaacgtgaagctcgagaagctgcagaacttgaaggtaagcccagattgtcacttttaacaaggagttcgtcattcttatccctgtcaccaagtagataggcctgtctaactagacaatttcagaaataagtgaggctgagactgctacttacttgctttcatagcccatgaagccaagtggtttactatttacttttgtcagggaagaggacacttaatttgactgtcttgttagaagaggattcctgccaacaggaagagttataagtaaattaagctaccatttagatgaagtagagctgaatcccagggagttttttctttttatacggtgctctttttggtatgtatctctgtatctgtgactttgcctgacctccttcactcctctacatattcctacatgctgagtccttcactccctccctgccccgacccgatctgtactttgcagaagcttcagctgagtcggaggacgagatgatccatcctgagggagtggcttccctgctgcctcctgactttcagagcagcctggagagaccagagctggagctcagcagacattcgcccagtacgtatctccctccccactgcgctgttttgtcaatcctgcgtagttggtggggggaggtagttacacctcctttcatgctaagcctccatgaaagtcccagggaaattctgtgacattgatatttgacatctgtttctcatggaaagtataccctttttgaagtctgctttcacctatatattgtgttaccttctcagtgttttacgaagcagtgtgatttttcttctcatctgtacctcttcaactcttctacctctgaatttggcaacagtcagctctttttcatctcttcaccagttgtgtatattacgtgttaacacattcagtcaccctctggagttgggtatctgctgtggtttaatcaacaaatttttattgtgtacttgttgtataccaggcacatgctaggcacgaggaatatagtaaagaaagaa

SEQ ID NO: 310 - DNA, 5110 bp, Homo sapiens
tccggatgtttgaaattaaatttattaagcactcactcacgtgtatattgtcctagacagggttgcgtttcagagaacaaagatccctaacacgatcatccagtcccgtcactacctgactccctcctcccatacaataacacattcccccatctctaggacatagggatcttagtcccctccccccacctttttcttcttcttttttgagacagggtctcgctctgtcacccaggctggaatgcagtggggtgatctcagctcactgtggcctcgacctccctaggctcaagtgattcccccacctcagcttcccaagtagctgggactacaggtgcacaccaccatgccagctaatttttgtatttttgatagagacagtttcaccatgttgcccaggcttgtctccaactcctgagctaaagcaacccaccggcctctgcctcccaaagtgctgggagccactgccaccactcccagcccccttcctttcttaagcactgttagggattgtgtctagctacctaaagaacatagactgactcttcccttaagccacttcccttgctgccaagttaggtcttcttccaataatataagatgctagaagacttagatcttgatcttatttctactttaaggttcgatagtccctcttaatgatttcctgtttagcttaatgcttggatgaggcggggcttcatgagctctatctttaagggtaaagccccttagccagacgtggtggtgcggcgtgcgcctgtagtcccagctattcggaaggttgaggcaggagaattgcttgagcctgggaggcggagattacggtgagccaagatcacaccactgcactccagcctgggcaacagaccaagaccttgtctccaaaaaaaaaaaaaaaaaaaggtaatgccgctttatctactaaggctaggcattattccatgccaaatattaccttctatgttcctaggttgctggttacttcagaccataatccctccatgacccacctaaggctgtccatgggactctgcctaatgctgctaatcctggtgggtgtaatgggaaccacagcctaccagaaaagagccactcttcctgtgagaccatctgcctcttaccattcaccagagctccacagcacaagggtcccagttagaggaataagggaggtgtgatgttgcccagaacatgacagggggtaaggaagagaataatttcttgtgagacaactggatggaaaatctattgtgtatacttaatttctactttctttggaatgcctctttccccggttgtcaatattatatagcctggcaatgaaaaaagggtgaagttttacagttctaaagatccattctttattttggtacaaaaataaattgttcaacctgtaaattgtcacttattttcgtattgttgtaaagcaaacttacagaataggaacacctgctaccagttccaagaatatcacatacatatgccttagaaaaaggccaggtatgatggttcatgcctgtaatcccagcactttgggaggccaaggtgagaatggatcgcttgaggccagcagttcaagaccagactagaaaacgtagcatgacccctgtatctacagaataatttaaaaattagccagatattgttgtgcgggcctgtagtcctagatactcaggagactgaggcagaaagattacttcagcctagaatttgaggttacagtgatctcacgctcactgatgatcatgccactgcactccaaacttaagtgacaacccatgtttttaaaaaaaaaaaaaagtcaccgcgagttcgattcaaacagtgtgaaggaggaagcaactaattatctccctctcctgatttttcataattttattaaatcatcactgggaaaactaatggtttgcgtatcacacaattacactacaatctgataggagtggtaaaaccagccaatggaatccaggtaaagtacaaaaacgccaccttttattgtcctgtcttatttctcgggaaggagggttctactttacacatttcatgagccagcagtggacttgagttacaatgtgtaggttccttgtggttatagctgcagaagaagccatcaaattcttgaggacttgacatctctcggaaagaagcaaactagtagactgatgagctggattgcttagattgataacatttacaaataggagtccagttgacatgctattaatgttgaaataaccatgcctgtactggtcagtgagttcggtcagctggttggaataccagttccagagctttaggcgacacatttgaattgagttatcattgtagagagtcatggctccatcagctatggttatcttctttggtctgaatgcctatcagtccttaccagctgtagcagccactgcttggtaaaactttgccacgaagtctggctcactgaactccagctgtctgacaaattcattgcgctcctgctcagcccagcctcgaaaccactgatcccaaagatgtagctggcactcaaagatagaaggtggtcggtctgccccagacacactaagctgctccagactatccagcagtggttgtaatttttctggcactgccttagctaccaggtcctctaggaaacgttcacgctggggacctgaccaattggcaaaccagtgaagaatacacttcatctcctgggaggtgatgtaagacatcagaggaggggaagggttagtattgtgtggtactgagggtaagagagatgggaaggatagtggcattgaagaggatgactccagtggcatcctgaaacataaaagcactgttatatgctctccaggtagagcaacgaaaatacaactttcaagcaacaagacatcttaccacactcaattagcatctacagagaaaattactttttatgaattcaaagacccaaaataataagagtcctttatttagattattatccaactaccttagaaaaatcaccaaaaataacttcatttcctatttgcctgcctttttcaaacccattcttccccacccactgtcttcctccatctttcttataaagaacctaaaaataaccaatatatttcttgttcattctcttcctcttacttctatgtgccaggttgggtaaagaaaaaaacaatgattaatgttggtccattacatcttctccaaaatgaaaatgcacacattttaaaatctagtacgtgcagctggtcaaggctgatgctaattgttttgcagctatcaacagtgggggaagaaagaaaaaacattatttatgatgaaagagccttcaatgtgcatataagcctctgaaatatgccaacaactccataacatccgttacctccttacatttcctgtaaagcaccaggaaaagttaaaaagcagagtaaggaccttgctcaaaataaggtaacgcatgaaagaaccagaagcccgggtgtttgagacgttcttaaaaaagagtccagttggtttgttggcttagagatctaacaagtgttatactattttatgacaatccatgtctttaaacaattgtccttaatatttagtatgggccagacgcggtggttcttgcacttccaaagtaatctcagcactttgagaggccgaggcaagaggatcgcttgagcccaggtgttcgagaccagcctgggcaacatggcaaaacctcatccctacaaaaaataaaaaaattagttgagcgtagaggtgcctacctgtagtcctagctacgtaggagactgaggtaggagcatcacctgagcccgggaggttgaggctgcagtgagccctgatcgcgccactgcactccagcctgcgtcagagtggagggacccagagtggagtgacaaaaaaaaaatttttttttttttttagtatggtatctattggtgccttgcaattttttttttttttttttttttttttgagacggagtcttgctctgtcacccaggctgtagtgcaatggcgtgatctcaaccactgcttcctgggttcaagcgattctcctgcctcagcctcccgagtagctgggactataggcgtacgccaccacgcccggctaatttgtttgtatttttagtagagacggggtttcaccatattggccagactggtctccaactcctgacctcaagtgatccgcccgcctcggcctcccaaagtgctgggattataggcgtaagccaccgcgcccggcaccttgccactgattttgcatcatgaatgcaacggaaagatcagccaatttgactttaatagttttcagtctcttaaatctctaacgtatctcttaaatctctaaactatttgtctgtgacctattttactgtttgtgtttcttctgcatcaagttggaggattggtagtgacaaagaaagaagcccctaaacaattaatattagttcaagtaccaaaaaagttcagggcgcttgcattttccagttcttgccctacaggaagcagttcctccaagggaacttactctcttctgcggagcaaggaagaactttcccagaatcttgccacatggcttccaaggcaaactcaaactcaagttcagcgtcatagatcagttcatagtctgggtccgaagacacggcgatgcttcttgcgcacccccacggagcttgttattccgattccgcaccagccccccgcccctccccaaaaaaagcctaagatgggagtggctatgattcagaggacagagggcagaagctgtttgcgttaaggagtggggggcttgccctattaaggtaatccgcaaacaccgagtctgacccggcccatagaggtacttctaccccgcttacctccccttttctctcgaagggcacccgaagattgtcacgagtccttagactccaactactgcggcagcttccaaatttcctgaaaaccctaagctgggccagcccggcagcccacgcacttccggcctcggacccgccccaaacacccaagcgccccagcgcctcatctctaggtccggaaataaacgaacatctccgattatggttataccagggtcgagggtttccgaatatattcgattcaaagcttcggcaagacgaagaaaa

SEQ ID NO: 311 - DNA, 390 bp, Homo sapiens
ggcacccaattttgcataatatctcaagcaaaagtctataaatatagcctttgtcttttgggaactacctgtctaagtcagtatactttgaggaaaatatgtgcaggttgagcatgcctaatccaaagacccaaaactttttgagtattcacatgacactcaaaggaaatgctcatcagagcatttcagattttgggttttcagattagggatgctgaatcagaaagtataatgcaaatattcaaaaatccaaaatctaaaacacttgtgatcccaagcattttggaaaagggatacttaatatgtatataagacatgtggattgttagtacatatgttaaaccaatgtgtaacttaacaagtattttgaataattagtgttgaggggga

SEQ ID NO: 312 - DNA, 13337 bp, Homo sapiens
  SITE (9965): n equals a,t,g, or c
cctggacagggctgcggtaggccagcggtgggctggcggttgcgctcctcagatcggcggcctttcgggcggtggcttgcgtttgagcctcagaaagcgaggagcggcctccacggaagccaagctggccgaggtaaccgagaagcggcttcccctatggcttcgaccctggagccgctggagcggcggcggccgcagggaggcagccattttccgtaggcggtggccgcggcgcttccgggccgcgcggctggagcctgaggcggggccaccgtcgggcacgagaaaccattctctccccgcttttcgcagctgtatcccagaggcgcggctgaagctcgctgggacactgcccgcttgcccagtgcccacgggcacgcctgtcgcagacacaggctgtggcgaatccgagtgctggcgggcagcagtgcctgcagctgcgcccgcagactctttcccgcctccgccggcatttccgtgtccggccgatgtcatgcggtcggttgagcctcagggctagcagcttctactgatgcaaaaacataggaagtgtctctttgcttctggaaccggggtgggcagcaaggagctggccacttctttgaataccggtggcatcctgggcagaatttcggtgccgtttctgctggctcacttcaggaaaagtgaggctcacggctctcctcagccccccttagaagtctaaatgacctttggagaaatacaaagtcagcagaaagtttcactttcatcgtcaccaactcctgttggagttgatatttcataaacatcagcgacagaaagaaaatacgacttgatattttgtaaataaaatatccttttttacaagttgatattttgtaaacagaggtcagctgtaattttctccagatcaagtaagcacagttaaaaattcatataggcctggcgcggtgtttgacgcctgtaatcccagcactttgggaggccaagatgggtggatcacgaggtcaggagatcgagaccaccctggccaagatggtgaaaccctgtctctactaaaaacacaaaaattagccgggcatggtggcacgcgcctgtaatcccagctagtcgggaggctgaggcaggagaatggcttcaaccggggaggtggaagttgcagtgagctgagatcacgccactgcactccagcctgggtgacagggcgagactccatctcaaaaaaaaaaacaaaattcgtataaatcatctgcatggcaccctttatgtgtgttgcaaagaatgatgagcatcttgttgcttacttgggagacattgtctgaaaataggctacttttttaccttctgtagtaccccctccccccactgtatctgggtttcacttacccgctgtcaactgccatccaaaaaatattaaatggaaaactccagaaataaacagttcataagttttaaataacttttttttttttttttggagatggaatctcgttttgctgccctggctggagtgccgtggcacagtctgagctcactgcagccttcacctcccgggttcaaacaattttcctgcctcagcctcctgggtagctgggactacaggcgcgcactaccacacctggctaatttttgtgtttacaataaagaaggtttcaccatgttggccaggctggtcttgaagtcctggtctcaggtgatccacccacgtcaggcctcccaaagtgctgggattacaggcatgagccacggcgcaccgccagttttaaataactcttactacagtgttttattgttaatctcttattgtacctaatttataaattaaggtatcatagctatgtatacatagagaaaatagtataatgcagttagatgctgttgggggttttaggtattcacagaatgtactggaacttaccccccttggagaagggatactactgtattttgatctcaccgtctcagctcttttgccagtattcctacaatggaaaatctaaaatgttgttttttaaggtgcctttatttttagtttttaaattagagacaaagtcttgctctaactcccaggctggagtgcagtgatgaggtcatggctcactgcaaccttgaattcctgggctcaggcgactctcccacctcagcctcctgagctagaactactggtgtgctctaccatcctggctattttttttttttttcttcaaattttgtgttttgtagagacggggtctcgctatgttgctcaggctggtctgaaactcctggctcaagtgatcctcccacctcggtctccaaaagtgctgggaatgcaggcatgagccactgcacctggcctaaaatatttttaaagtgaaggcttccatcttcacaagaggatgaagggtcataaaagttgtactccccttactagagacagactgggatgatctgttgaaatttaagagaatctcagaatgttttcctaatcttattttctcctattcttttcttatggggaagatgggataggaggcacaccagttaaatccttggaaaatcccaaaatacctttcagccagtgggtgccaattttcttacccaccaatctttcctaaattgttttcttttttataaaaaagacagttgtccactgacatttgtgtgttttgtgctgtgcttcagctgaataatagaaaaggagaaaaacaaagggcctgctagttgattttgaagggaagacaggacaccttttctgttcttctttctctcataagtcgcaagtgatgaggttcatgtgagtttcttattgatacatacttttctttttcttgtcctcagtgcttttaggaagaagatccttttattgcttttgtacaagaccagacaggatctcatttgttaaacgtggtaccaattgggtgtcttaacacaggagcagaacttcctagagcagaatgatgatggtagatctgaaagtggctgcgtacttggaccctcagatcagggctttgtgggagaccaaggggcctgcaagagagagctccggtcagagtaaaaaatctcctcaaatggactgtctcgatcctaagagctcttgctggcacttccggaatttcacctatgatgaagcaggtggaccccgtgaggctgtcagcaaacttcaagaattatgtcatctatggctgaagccagagatccactcaaaagagcagatactggaactgctggtgctggagcagttcctgactattctgcccagggagacacagacccagatgcagaagcaccatccacagagcattgaggaggctgtggctctggtagaacacttgcagagggaatctggtcaaacatggaatggggtgagaagaaagattcctgacatgtacagtgaaataggatgcaggtggatatagtagagatggtggcagttagttgagaaattagatggattaggtaggtcattgtttggttttttttttaaggacagttaaggtgggacttgaaactacaggcccacagaaaagttcacaggtttcagagattgtggtagatacttccctggccttagagaaagagagttgcttttgccctctttggagccagggtgaattgagggtgttgggcctagtctggcttggccaaggagacaggacttaagtacttagaaacagaataaaaggtaataaagagtcagggaggctggatgcagtggctcacacctgtaatctcagcactttaggaggctgaggcgggtagatcacctgaggtcaggagttcaagaccagcctggacagcatggtggaaccctctctctacaaaaataaacaaattagctgggcatgatgaccggtgcctgtaatcccggctatcctcgaggctgaggagggagaatcatttgaacctgggaggttgcagtgagccgagatcgcaccattgcactccagcctgggcaacacagcaagactccatctcacaaaaaaaaaaaaacaaaaaaaacaaaaaaaaaacgggccgggtgcagtgactcacacctgtaattccagcactttgagaggccaaggcagacagatcccctgagcccagcctgggcaacatggtgaaaccccgtctctacaaaaaacatgaaaattagccaggcatggtggcacacacctgtggtcccagttacttgggaggctgagtcaggagaatcacctgagcccaggaggtggaggttgcagtgagctgagatggcaccattgcactcccttgggtgacagagtgagaacctgtcaaaaaaaaaaaaaaaaggcagatccacaaggagaacacaggaaaacaaggacacttaaagaaaaggagaaattggccaggttcggtggctcatgcctatatttcgaacactttagggggtcgcggtgggaggactgcttgagaccagcctggggaacatagtgtgaccttgttgctatgaaaaaaaaaaagaaaataagccaggctgatggcacatgcctctagtcccagcttcacaagaggttgaggtgagagaattgcttgacccagaagtttgaggctacagtgagttattattgcagcattgtactctggcctgggcaacagagtgagaccttgtctcttaaaaaaaaaaatgttttaggccaggcgtggtggctcacatctgtgatctcagcactttgggaggctgaggcgggcggatcacaaggtcaggagttcaaaaccagcctgaccaacatgctgaaaccctgtctctactaaaaatacataaactagctgagcatggtggcgtgtgcccgtaatcccagctactcagaaggctgaggcaggagaatggcttgaactcgggaggcagaggctgcagtgagctgagattgcaccactgcactccagccagggcaactgagcgagactccatgtgaaaaaaaaaatgtttttaaaaattaggaaaaatccagcctgggcaacatggtgaagctcagtctctacaaaaaatacaaaaatcagctgggcatggtggcgtgtgcctgtagtcccagccactcgggaggctgaggtgggaggatcacctgagcctggggaggatgagactgcagtgagccatgattgtaccactgtaccccagcctgggtgacagagtgagacccccgtctcaaaacaaaacaaacaaacaaaaaaaacaactaggggaagactgcacaagaaaagaaaacatagaaaaaagggaaacaaagatttggaaaaaagaaaaatcccaacagaatagccaaggacaggaaatgcactgatgggtaatgtcctccctatagtagatgaaagtctctactgccttcccttaatgcttgttccttggctctgctgacaagttgggagccagggtatgaacttggtgggtggcgacacatctgctgacctcgggtctgctgggaagaatacagggcaggacctatgtttggtgtcagaatcatctggaggtaggttggagccactccccttttttctccattctatccccattctctgaaaaccttcgctggctatagggataatcaggctgacaggaaaacttttaaattcatttatttgaattttagagaaaactagaagacagaaaaccacaactgtgggattgaagtcaacagaaaaggcctgacaagacagtattagaatgagtggcctgcctggctgggcacaatggctcacacctataatcccagcactttgggaggctgaggtgggcagattacctgagtttgggagtttgagaccagcttgaccaacatgaagaaaccccgtctctactaaaaatgcaaaaattagccaggcgtggtggtgcatacctgtaatcccagctacttggaaggctgaggcaggagaatcacttgaacccaggaggcagaggtagcagtgagccgagattatgcctttgcaccccagcctgggcaacaagagcaaaactcatctcaaaaaaaaaaaaaaaaatgagtgggctgcccaaccctgccagtggcctgacctagaccgtatacagaggagtagaagctgctgtgttaaagggctggcaggcaccacagtttgtttcctttcaccctagttttctcatatttgtgtatagtcatttgtggagcattggtggcccagtatctctttaagcctttttttgtcattttttttagtgtcttatactacccacaatgtgggctgtacacctgtcgctctgcctccacccccacaaaccaaaagtaagttctgtggtaacaaggatgggaattatttctaggttgcagtccatgagctgggaaaggaggcagtgctcttgggagaaacagcagaggcctcaagtttcgggctgaagccaacagagtcccaaccagtgggcgtatcccaagatgaagaattttggaatacatacgagggtctgcaagaacagctcagcaggaatactcataaagagactgagcctgtgtatgagaggggtaaggagcttcatgataattttcttctcctgggagctgtgataatagtttattcacccaaaatgtcatgggcattttttgaataccctgctctgtggatttgtaaaaccagccttgatagcaactatgatgtccttccaggcagcagtagaaatgccaactgtggatgaaagtgggagtaggcctagagaacagaaatatctaaaccacagaactcttggtaataacagtgtgaactctgttccttagactagtggagaggaaggaaagaaatggagtgggaaggcttggggccacttcatccttgtaaaatacagaaggaattgagatcagatgggctgttagtggcagaatgtgaaaacagttgtgtaccaggaaaaacataataaaagacaaaaaacttcatctcctaccatacagtggagtccctgagtacttcattttaagatatctttaatttttgcctaactcagaaaaatatgagaggaaaaagggatttcccttttatttctctgatgaaaactgaggaaacatttagttggggaactagttctaggggctggtggatatttgattcttatttatgaagagactgcttcaggcatcacacacaccacacgtgtaaaggtgtcccatctgtacttaaaaagtcaggatcagtgttttagaaatgagctcaggatgtttatagataaaagagatttcttctggctcttttccccccacagctgtgcctactcaacagattctagcttttcctgagcaaacaaacaccaaagactggacagtgacacctgagcacgtcttgcctgagtcccaggtgagctgtgctttccagctgttgagggctacctttctctgctatgtatgattaatactgtccaggaggggttcagaggtgtgttagtcccgggtgttctctgggcaactgggtacctcccaggctgtgggctgacgccttttctcctttttttctgccttctcacttaaaaaaatcatgttcttttaattcctttatcgcctggccaattcatagccaggtggctaggctgcttctgtacagtggcaggttctgagctgaagtccattctcttctttagagcttgttgacatttgaagaagtggccatgtatttttcccaggaagaatgggagttattggatcccactcagaaggccctctacaatgatgtaatgcaggaaaactatgagactgtcatctctctaggtaaagattttcccttccctttatgtagttgagtactctattcttggcttactgagaaggaaccccagtgaggggtgtcttactgttccaggagctggttgattctcatctagatggtataggggagggtgtaggtagtgtatccagatcacctgtggagctttttccaaatgtacatgccgattgcttatcccacattgagtcctttatcctttccttctcttttccaccaaacttcctcttctgtgtcttacttatctcagtaaggggcacattcattatccagtggctcaaggcatacaaagtaacagttttcctttattctgatcttgtcatcataccccactgttaattcattagcaagttttcttagctttactttgacatatcctgactgcaacaatgtctcatcttcttgcactgttagcatcctggtgtaagccagtgtcatcttgaaccaggcatacatgcgtagctttttaacaggtgcgcctgcatctccttgtgcccttccacagtctgttttctatacagaagctagattgatcttttaaaaacctaatcagatcatgacatttcctttcctcaaaagcatgtggtcacttacattcagaaaaaaaagtctgatattaccagggctccaggacactctacagtctggttcctgctcatctgtctgccctcatttgctactgaagcccttgctcagtcctcaccagccacttagctagtctccttgctgttaattgaatttgtcaagttcatttttaccctcttgtttcattttatttggcacactgggcttcctgaatacttcattttcaaattgagtacatctaagttttgctcaactcagaaaaatgtatatcatgcaaggggaaaaaacgctatatatatatatctttttattaactttcctcttgaaaactgaggataatcatcttggggaaccggctctaggggctgggagacactttgatctaatttacaaaagaacccagtggttaccccttcacactcttaaaaaggtgttctatctttcccagaaagaatcaggaatttcctgtattttacaaaatgagttaaggatgatcatagaaccaagagaaatattcttttggctcttttccacccacaagctgtgcctgctcaacagattttaatctttcttgagcagacaaacaccaaagactggacagtggcacctgagctcttcttgcctcagtcccagttgagctgtgctttccagcagtgtagggctacgtgagcatgaccttatctgcctttccctgctgcccaagacccacactgcccagcatgtgccctgaggcatgttagccccagaggttctaccctggacaattaggcttggcccagagggaactgggtacctcctaggctgtttgctgatcccttggctccttttcttctgccttcgcccccgtgggcccccgcctttttttttcttaaatcgtattctgttaatttctttagcacctggcctaccatgcagttcatacgcagttaggctgcttctgcagtggcaagttcagagctgaagtccattctcttctttagagcttgttgacatttgaagaagtggccatatatttttctcaggaagaattggagttactggattacactcagaaggccctctacaatgatgtaatgcaggaaaactgtaagactgtcatttgtctaggtaaagattctcccttctttttgtgtagaagttgagcaatctgttctcagtttactgagaatgaacctctgtgagagggtctcagtgttccaggagctggttgattctcaactagatagtgtagcggagggtgtaggtggtgtatccagatcacctggggagcttttccagatgtacgtgctcattccttgtcctacgtggagatcttgatcccttccctttccctttccccaaaccttctccatcatgtttttcccatctcagtaaggggcatcagcattatccagttgctcagggcaaacaaagtactgtcatgtttttttttttttttttttttgagatggagcctcgctctgtcgcccaggctggagtgcagtggtgcgatctcagctcagtgcaagctctgcctcccgggttcatgccattctcctgcgtcagcctcccaagtagctgagactacaggtgcccgccaccatgcccagctaattttttttgtatttttttagtagagatagggtttcatcatgttaaccaggatggtctccatctcctgaccttgtgatccacctgccttggcctcccaaagtgccggaatnataggcgtgagccaccgtgcccagctagtactgtcatcttttcccatgatctggccatcataccccactgttaattcattagcaagttttcttagctctactttgacatatcctgactgcaaccatgtttcagccccttgcactgccagcatcctgatctaagccagtgtcatcttgaagcagatcaatgtcagtagctttctaacaggtccccctgccttcgctcttgtcctcccacagtctgttttctacacagaaccccaactgattttttgaaaacctgatcagatcgttgcatttccttgtttcagaagcctgtggttacttcctaaccatatttggagaaaaatctaaacttcttaccaaggcctcaggaccctccatggtctggctcctatggagttctttgcacatgtgtcctgctactggtgcgcttgtgcactcagtccttagccacactggttgtctttctgttacttgaactcgccaggctcatttctacttttcctttgccttgcatacttttctgccatgtgacaaaactcacttttaggtttctgctcaagtattactttctcaaagaggtgtcccacaagaccttatctaaaatagctttacaggagcagaatcttaaatactctttaccgtgatttaattttctttaaaacatttatcactccctgacattattttgtttattgattgattgtgccatccctctactgtaatgtaaagtccgtgaaatcaggggtcttcttcactactatatccctagccctcgagcagtgcctaacacaccatagccactcaatacatgtttgttgaatgaatgagtgagagagtttcataccttgtaatccgtaattagagaaacttcaccaagtgattttggtctatttcttctacctgcatatgaaccagtaatctataggaatggtagaaatctatcctagttgagggccagtggctaaggaataaaggctaaataaaaagtagctgtaattataatagtaatcacttgtgcttatgatactcaagtcagcgtccttcacattggctttgccatacctggtcttatccaggctgagtccttctgaagagttaataagaccagcttatattccctgcaacttctggagcttggttcccccttggttggatatagggtattgatggcaaaagagagagaacatgtactggattcccattccctatatccttttcattgatccaccgtagatttatttcttagtctctgctttgcatagctacctataagtataacatagtataaacgtgatacttaatcttggagtctatccatttaaccatttggagtaacaaattgtaaaatgtctttggtcatcctgaaacagtctgggattagtggaccagttcactgttaagttaccagtccttgacctcattttgtccatttgacagcattgtttgtgctccccaaacctaaagtgatctcctgtctagagcaaggggaagagccatgggttcaagtatccccggagtttaaggatagtgccggaaaatctcctacaggtaaatataccatgggaagtggagaaatgtgccttgatgtgaacttttgcaagggcttaacattttaagattttgttccttttttttttaatcattgaatttttctttttattcctgtgatttgcttgttctgggatacagatgtgtgattatgtttattccaacagggttaaagctcaaaaacgacactgaaaatcatcagcctgtgtctctttctgacttagaaatacaagcatcagcaggcgtcatatcaaaaaaggccaaagtaaaagttccccagaaaacagcaggcaaagaaaatcattttgatatgcacagagtgggaaaatggcaccaagattttccagtgaagaaaagaaagaaactttcaacctggaaacaagagctgctcaaacttatggatcgtcacaagaaagattgtgcaagagagaagccttttaaatgtcaggaatgtgggaaaaccttcagagttagctctgaccttattaagcaccaaagaattcacactgaagagaaaccctataaatgtcaacagtgtgataagaggtttagatggagttcagatcttaataagcacttaacaacacaccaaggaataaaaccatataaatgttcatggtgtgggaaaagcttcagtcaaaatacaaatttacatacacaccaaagaactcatacaggagaaaagcccttcacatgtcatgaatgtggaaaaaaattcagtcagaactcccaccttattaaacaccggagaacccacacaggtgagcagccatatacttgtagcatatgcaggagaaacttcagcaggcggtcaagccttcttagacaccagaaactccacctgtgaagagaagcttgtccagtgtcctcattctgaagacattcaccaaatggagcttggcactaaaatttatgtaaaagaaaaatcacaaaccttgaaaaattttacatcagaaaatgggataaacatacatttcacagaaaataatcaagacttgctctgcagccactcagtagtcttctgtggtcacagaagtaaacattgttggctttgtattgatctctccagtcatttttgaacacatccaatagaaacattggcagcatggtcttccaaaacaaaaagcagtaacatgcatgtttaattgcataccattctcttcacagtagcaggcttaccaatttccatagtctcatgaggccgaaatgaattacaatgtaaagtgttccaggaaccaaattggattttctttcttttgtcattggacacggtttgcaaagttggacatcacttgagttccttcttaaacttttcggcaacttctcttggatcctgttatcacagttttttactgtgatgaaatcttgttaaccaccactagggaatctccagatgaactattaatgcactgtcttatgcctctcattggtgatgtttggaaaatagaagacatctctaatggaatcatgggggaaacgggttggaatttgtagccatggaatatatattagatgtaaagaattttctgcaataaaagaaactagacttgttaatccctgccttgcaatgtcagtaggataaagcagctataaaaattagtacttgcccaaggcctgaaagagaattagtgggaattaagatcaacttctcagttttgtttgtttactttttaattggcttttctttgttgttaagaatgagagacttaatttccatgggagttggagtgtgtgtgctgcaggcaggatcctgtggctcatttggcatggagacctggacatgtagtcagcaggagacggttccctaaataaaagatt

SEQ ID NO: 313 - DNA, 10953 bp, Homo sapiens
taaatttaaagaaacacaaatgtattattttcaaactgtaaattttataaccattatataaatgggcactgatatacaaaataatgtcagttgctaaaacaagacaattcacagctggcctacatcatataatggcagaaatctttaaacacaaaatctaatgattagaaccagaagttgaaggcccactgaaggagtccttaatattatgaggcctaggtttcaaaaagctaccaattctagaatggattttactctggaactgtttcttgactatttcttgttgcatctctttcagtgtgaagtggaatctctgaaactcaggtgtggcatcaacaaagtcaagaaggtagtccaaactctctcttacagcagataatttaaattcagcagtctgcttctcagcttctcctcctttttgaacaacttcctttgttattccacctttggtttttaggagacaacccttttcttcatctccatttaaccacaccctatcatcatccaacttagtttccaactccccacatttttcaagaatttctctataatccccatgttctaagccttgaaaatcatattcaggttcctttttgtaaagaagattttcccatgcatttgctatggttatttgttttacttcttcccaactttttgcccagttaaaaattgcactttttatattgtagattttaattttggaaactcctttatctcctttctcttgctcatcatcactttcttcaaatattacaagactctcttcaagttgcttccatctatacagccgtttgcagctcaagatcacaccttgattcattggttgaatcaaggttgaagtgttatgggggaagaacatacattttattcgaccatcctcactggttagggattcagaggaaggatgagccgggcaactgtccagaagtaacaatgccctgacgtcctcgtcatgaaatcttagaacattaagttgaaaatgtcggacctcaggaacaaagttttgaaaaaaccattctgaaaacaattctctggtgaaccaaacatctttactgggtttatatatcacaggcaatgtacttgtgtcctctttcacacttttgggcagttttgattttccaataatgattgactttaatttatgagttccgtctgcatttgcacataaaaaggcagacaacctttctttgtttattttcttccctggtaggcagatatctttcctacttgcctgagaattttctggcattgacttccaaaagaggtctgtttcatccccactgtatagctgagctagacacagtttctcctctttgattatcatggacagtttttgtcgaaatggctcaacattttcagaaactgaacttaggacttgttccccacatccttttcggttcccaattgcatgccgatttcgaaatctaaaaagccaaccagtgctagctttgaaatctgttcgcccaaaacaccgtgcaaatctctctgcagcagcctgaagctccacgcctcttaccggaacaccggctgagcgtttctgttggtaccacatgtagaccgcatcatctacatcaccatatttggctcccgttgtcctctttctcttctcagcccctactaatggcatgtcctgcttcagtacaaagtccagaattaacttcttattttttttaatgtcataaaatgttgacttactgattccaaattcatccattacacttttaagtgatcgtccagcttcaattctacttagaaccttcattttctcctccaaattcagtgttgtatatttccctctcttattcatactgaatttaactctgaaccaccaacaggagaaaacaaagggaaaagccttaatgaattggcaaaaaaaaaacccacattttttaaacaaaacttagctgaaagccccagaaggcatgggcattgtattggaggataatggactgaaggggctaaccatgactgaagagctagtctagaggtggaggtcttatgcactcagaaagctgccagttgcaaagtcctgtctggctcttgctcctgcaagccatgagtgatcatttttcagaatgccccctacctctcctctcttttgacagatacaacagcctcagtcaggaatgacaggaatacctgcatactttccctaactcaataccggaaaacggacaatatgaagagaggagggatggagcaagatgtgcccacaagacaggtgtgataagtttccataaaaactgatgcttcagaagaagggagcgtgaaagactcaaaggcaatgacagagtaatcttgtgtgtagcagagatgcaatgtggcttctccccttccaaaaagacctgattttacctcactgccagaaaagagaatggtgctcaaattgctttgtacatagtgttcactgggcagcagttcatctacctggataagggctccgagctacagggaccctgacattgggatgtatggagagttggaattcaggaacagttgtaccgaatcttgaagtgaagaagaaagtagtttgttgtacatatgaatgaaatccaacttttattgcattcaatatagtattgtcaagcaccgtgctttaacttgaatgtctcttgtgtttgccaaggtaatatgtaagtatgtaaataatttatttgtcagtggcactttaccattctcagatcttctttcttgggaacatctgatttattctcaagtgctatttttcactgaaactgttctctatttgagatattatcaagtttcagaatcacagcaattctcagagatgagcccaaaagttttacaaatatttcaccatagttaaaaatttttaaagatctgtcctttcatttgttttcctaaatttacactataagtaacatactttttatatttgagattttgatttctcttcagtgtttattttacttaatttgaaccaagactcaacttttccacagaagaaatctaaaaggtttctctgctgctgtttctgatcaattgtttctcataaatcctactggcaaactcttctgtccctctaggccctcaaatactcttttcgggtcctcctggtgctccccaaagccattccaggtccttagaaatgtcttagtctagattaatttcctggttctcagtccagatacacaacctcatgggaagaaacaaaaactgccacttttatccattccaggtgctacgaagaaagaaaagtatgtcagagaaataagggaaatggctggtatctcagttattcttcctcttctttagggcagaatctgactggcccattcattcctcaactacatagaattctctctctttttttttttgagacagagtcttgctctgtcacccaggctggagtgcgatgccgccatctcggctcactacaacctctgcctcccgggttcaagcaattctcctgcctcagcttcctgagtagctgggactacaggtgtgtgccaccacacccggctaatttttgtatttttttggtaaagaggatttcactatgttggccaggctggtctcgaacttctgaactcatgatccgcccgcctcagcctcccaaagtgctgggattacaggcgtgagccaccacacctggcccatagaattctcttaggtctctcatctaaaaacccagaagagtcagaccactggttttcctgtaacattcattgcaagaaatgccaactatgagttatagagcatggagaagattacaagagaatatggtagtaattagggggtggagccaatggcaggctacgatcaagcaactttctaaatgaggcaactataattaaggcagttagtaagtgataactcagacataaatcttggtttatctctttcacttataaatagaaaaataaaaaagtatttgctagccaatagcagcaccattaactcaagctagtcacctagcaaaaatattcaggccactatgacagttgtgtaggtgtctcagaattaatgtatttgctttcaatgcttctcagctgtgccgtcgtcttttttttttttttttttttttgagatggggtctggttctgtcgcccaggctggagtgcagtgacacaatctcggctcactgcaacctctgcctccagggttcaggccattctcgtgcctcagcctcctaagtagctgggattacaggcacgcaccaccatgccccgctaatttttatatttttagtacagacaaggttttgccatgttggccaggctggtctcgaactcctgacctcaagtgatccacccacctaggcctcccaaagtgctgggattacaggtgtaagccactgcgcccagccacagtcatcatttctaaaacagtgcccaagcaaggggaggtgaaaccaaaaggaaaggctcaaggaatgtttgtgggcttcaaaggataagccactatggcagcaaacctcacacaatgaaaatcaccagtgcctcttattcactattcacaatttgtgccttgctgcctctttttcccatgaatcccttttccctttaaccaacttcctgtgttatgaatcaggcctgtcaatgatatccaagggcactgcttagcactgctagcagaacttcacttattcaacttaataaattctaattatatattcagcattgggccaggtgatgagaatcttaatgctgatggcgctactgtccactggttctgatagactgagaatatttactgctgaagaaatgaagtcccaacctggctgagattttaaggaaatgaacctacttagacacaaattcaagtgacttaggcagatgctcattattaaatctgtttatctttctctctcacttaaaaaggatcaagatctatgcctaagaggagttacataccatcccatccaaaagcaaaaatagcataatggcctggtaatggcctctcatcttcattctcaccttaaacttaccttagatgaactgccatagaaagcagctcagtccaaaacgctcaaatggtgctccaggatttacttttttgtattgttttgttttgttttttgcgacggagtctcgctctgtcgcccaggctggaatgcagtggcgtgaactcggctcactgcaagctccgcctcccgggttcacgccattctcctgcctcagcctcccgagtagctgggactacaggcgcccaccaccacgcccggctaatttttttttgtattttttagtagagacggggtttcaccatgttagccaggatggtctcgatctcctgacctcatgatccgcccgcctcggcctcccaaagtgctgggattacaggcgtaagccaccgcgcccggccaggatttactttcttaaatgcactcttttcattcccattcaaaggactccagtataagtgccacataaactcgttttctaacttttaaaactcttcctctaaatgcagcccaactcagtaaaaacgtacctaagatctcacagtctaatgtttccagcttttaaagcctttactcctacccttccctctgcctggaaagtgtctccattccctgctgtggacaaaatccctcaaggtcttttataatttcccccaaccccaaatcaacttggattttcttggagttctcacagcattcagtttatgtcctattcttacccttgtgttactgatattcacgaaattgctcagtcctttcaagagattgcttaaggacaaagacttcttactcaactctgcaatattggctacacatagctgacttaataaatagtcccttgactggtataagctgacgttacaaaaactggtaattccgaaaccactcatactggacttattaaataatccctcaactggtacagactgacattacaaaaacggattaattcagagatcactgaacacccaaaacactcagattcttataactatgattcagtaaatatgtgtggaatgcctatcttaccaggtgactatgttaggcgctgcatgagatataagatgaaaacaaggttcccattttccagggaagaatactggagtggaaaacgcagaggataccacaacaggagagctatttccgattagcggccgccactgctgagctatgtgaccctgagcaagtcacttcttaggtctccgtttctctgtcaaggagagatagaaaaagaacctatttcacaggttcaaacctacctcaagaaaaaatagttgtggggaatgcgtcacgagacctagaaaacggtacaaaaccctcggggggccgctgtttctgacctagcgagtggcccgacccggacaaaatgcctcttcctcgaggaggcggcgacgagcccagcaacagctcgagcacggccggccgggccgcgggaagcccgagaacgcggcgcgcgcagctgggaggcgacccttacccggcgaggctcccgggaccaaacgccgcccgacagccacgcagaacagacgcggcagtgcgacgcctcccccactggggacacgagacagcgacagccacgcggtgagccggtacaaggccctctaggcttcagcgggtctggatactcggtggcattaacccttccctaccgccggggaagacagcagtttctctggcgaggaagtaggccgggctcaggcgccttagccagagggcgggcctgcgccaccctcggaaagcgtcacttccacttccggccggcgctctggctctgtacctggacagggctgcggtaggccagcggtgggctggcggttgcgctcctcagatcggcggcctttcgggcggtggcttgcgtttgagcctcagaaagcgaggagcggcctccacggaagccaagctggccgaggtaaccgagaagcggcttcccctatggcttcgaccctggagccgctggagcggcggcggccgcagggaggcagccattttccgtaggcggtggccgcggcgcttccgggccgcgcggctggagcctgaggcggggccaccgtcgggcacgagaaaccattctctccccgcttttcgcagctgtatcccagaggcgcggctgaagctcgctgggacactgcccgcttgcccagtgcccacgggcacgcctgtcgcagacacaggctgtggcgaatccgagtgctggcgggcagcagtgcctgcagctgcgcccgcagactctttcccgcctccgccggcatttccgtgtccggccgatgtcatgcggtcggttgagcctcagggctagcagcttctactgatgcaaaaacataggaagtgtctctttgcttctggaaccggggtgggcagcaaggagctggccacttctttgaataccggtggcatcctgggcagaatttcggtgccgtttctgctggctcacttcaggaaaagtgaggctcacggctctcctcagccccccttagaagtctaaatgacctttggagaaatacaaagtcagcagaaagtttcactttcatcgtcaccaactcctgttggagttgatatttcataaacatcagcgacagaaagaaaatacgacttgatattttgtaaataaaatatccttttttacaagttgatattttgtaaacagaggtcagctgtaattttctccagatcaagtaagcacagttaaaaattcatataggcctggcgcggtgtttgacgcctgtaatcccagcactttgggaggccaagatgggtggatcacgaggtcaggagatcgagaccaccctggccaagatggtgaaaccctgtctctactaaaaacacaaaaattagccgggcatggtggcacgcgcctgtaatcccagctagtcgggaggctgaggcaggagaatggcttcaaccggggaggtggaagttgcagtgagctgagatcacgccactgcactccagcctgggtgacagggcgagactccatctcaaaaaaaaaaacaaaattcgtataaatcatctgcatggcaccctttatgtgtgttgcaaagaatgatgagcatcttgttgcttacttgggagacattgtctgaaaataggctacttttttactttctgtagtaccccctccccccactgtatctgggtttcacttacccgctgtcaactgccatccaaaaaatattaaatggaaaactccagaaataaacagttcataagttttaaataacttttttttttttttttggagatggaatctcgttttgctgccctggctggagtgccgtggcacagtctgagctcactgcagccttcacctcccgggttcaaacaattttcctgcctcagcctcctgggtagctgggactacaggcgcgcactaccacacctggctaatttttgtgtttacaataaagaaggtttcaccatgttggccaggctggtcttgaagtcctggtctcaggtgatccacccacgtcaggcctcccaaagtgctgggattacaggcatgagccacggcgcaccgccagttttaaataactcttactacagtgttttattgttaatctcttattgtacctaatttataaattaaggtatcatagctatgtatacatagagaaaatagtataatgcagttagatgctgttgggggttttaggtattcacagaatgtactggaacttaccccccttggagaagggatactactgtattttgatctcaccgtctcagctcttttgccagtattcctacaatggaaaatctaaaatgttgttttttaaggtgcctttatttttagtttttaaattagagacaaagtcttgctctaactcccaggctggagtgcagtgatgaggtcatggctcactgcaaccttgaattcctgggctcaggcgactctcccacctcagcctcctgagctagaactactggtgtgctctaccatcctggctattttttttttttttcttcaaattttgtgttttgtagagacggggtctcgctatgttgctcaggctggtctgaaactcctggctcaagtgatcctcccacctcggtctccaaaagtgctgggaatgcaggcatgagccactgcacctggcctaaaatatttttaaagtgaaggcttccatcttcacaagaggatgaagggtcataaaagttgtactccccttactagagacagactgggatgatctgttgaaatttaagagaatctcagaatgttttcctaatcttattttctcctattcttttcttatggggaagatgggataggaggcacaccagttaaatccttggaaaatcccaaaatacctttcagccagtgggtgccaattttcttacccaccaatctttcctaaattgttttcttttttataaaaaagacagttgtccactgacatttgtgtgttttgtgctgtgcttcagctgaataatagaaaaggagaaaaacaaagggcctgctagttgattttgaagggaagacaggacaccttttctgttcttctttctctcataagtcgcaagtgatgaggttcatgtgagtttcttattgatacatacttttctttttcttgtcctcagtgcttttaggaagaagatccttttattgcttttgtacaagaccagacaggatctcatttgttaaacgtggtaccaattgggtgtcttaacacaggagcagaacttcctagagcagaatgatgatggtagatctgaaagtggctgcgtacttggaccctcagatcagggctttgtgggagaccaaggggcctgcaagagagagctccggtcagagtaaaaaatctcctcaaatggactgtctcgatcctaagagctcttgctggcacttccggaatttcacctatgatgaagcaggtggaccccgtgaggctgtcagcaaacttcaagaattatgtcatctatggctgaagccagagatccactcaaaagagcagatactggaactgctggtgctggagcagttcctgactattctgcccagggagacacagacccagatgcagaagcaccatccacagagcattgaggaggctgtggctctggtagaacacttgcagagggaatctggtcaaacatggaatggggtgagaagaaagattcctgacatgtacagtgaaataggatgcaggtggatatagtagagatggtggcagttagttgagaaattagatggattaggtaggtcattgtttggttttttttttaaggacagttaaggtgggacttgaaactacaggcccacagaaaagttcacaggtttcagagattgtggtagatacttccctggccttagagaaagagagttgcttttgccctctttggagccagggtgaattgagggtgttgggcctagtctggcttggccaaggagacaggacttaagtacttagaaacagaataaaaggtaataaagagtcagggaggctggatgcagtggctcacacctgtaatctcagcactttaggaggctgaggcgggtagatcacctgaggtcaggagttcaagaccagcctggacagcatggtggaaccctctctctacaaaaataaacaaattagctgggcatgatgaccggtgcctgtaatcccggctatcctcgaggctgaggagggagaatcatttgaacctgggaggttgcagtgagccgagatcgcaccattgcactccagcctgggcaacacagcaagactccatctcacaaaaaaaaaaaaaacaaaaaaaacaaaaaaaaaacgggccgggtgcagtgactcacacctgtaattccagcactttgagaggccaaggcagacagatcccctgagcccagcctgggcaacatggtgaaaccccgtctctacaaaaaacatgaaaattagccaggcatggtggcacacacctgtggtcccagttacttgggaggctgagtcaggagaatcacctgagcccaggaggtggaggttgcagtgagctgagatggcaccattgcactcccttgggtgacagagtgagaacctgtcaaaaaaaaa

SEQ ID NO: 314 - DNA, 1024 bp, Homo sapiens
ttctcacagcattcagtttatgtcctattcttacccttgtgttactgatattcacgaaattgctcagtcctttcaagagattgcttaaggacaaagacttcttactcaactctgcaatattggctacacatagctgacttaataaatagtcccttgactggtataagctgacgttacaaaaactggtaattccgaaaccactcatactggacttattaaataatccctcaactggtacagactgacattacaaaaacggattaattcagagatcactgaacacccaaaacactcagattcttataactatgattcagtaaatatgtgtggaatgcctatcttaccaggtgactatgttaggcgctgcatgagatataagatgaaaacaaggttcccattttccagggaagaatactggagtggaaaacgcagaggataccacaacaggagagctatttccgattagcggccgccactgctgagctatgtgaccctgagcaagtcacttcttaggtctccgtttctctgtcaaggagagatagaaaaagaacctatttcacaggttcaaacctacctcaagaaaaaatagttgtggggaatgcgtcacgagacctagaaaacggtacaaaaccctcggggggccgctgtttctgacctagcgagtggcccgacccggacaaaatgcctcttcctcgaggaggcggcgacgagcccagcaacagctcgagcacggccggccgggccgcgggaagcccgagaacgcggcgcgcgcagctgggaggcgacccttacccggcgaggctcccgggaccaaacgccgcccgacagccacgcagaacagacgtggcagtgcgacgcctcccccactggggacacgagacagcgacagccacgcggtgagccggtacaaggccctctaggcttcagcgggtctggatactcggtggcattaacccttccctaccgccggggaagacagcagtttctctggcgaggaagtaggccgggctcaggcgccttagcc

SEQ ID NO: 315 - DNA, 451 bp, Homo sapiens
tcattctgttcaatttaatgaaggcctatgatgtgtcaggcactgtcctatactctgaggacacaggagtggccaagagacaaaattgcatcccctcatggaacttgtattccagtgaacagtaagaagaatggttttgctttcctgctccttgctctaagacgggtatgagatagttttggtcaatgagttgtgagcattgtgagcctctggctgaagcttttcatttttttttttttatttttttttttatttttttgctggtacaaggccagtgctctcctttcctgccttaatcatggaaccacatacagagagagcagccatgaaatcaaagcagtccagaacactgagccactgcatggagggcggctattcccaagagtctccagacctatagtgaactttgtgagaacaagaaataaacatttgttctgttaaatcactgaga

SEQ ID NO: 316 - DNA, 4329 bp, Homo sapiens
ctaaccctgggacaataaggacctctagcctctaagtccaaatgggtgcaaagaggtcttgggagatgtggagtgaccctgagcagcagccacacatccttagcaaaggtagcacatgaaaccagcagggaggctggtgggtgagaaccagtgccacatctaagccctgtgaaaaggcctggcagcgtcaggctggggagcaatgacaacaaagccagaggtgggacacagactggaagaatgttttaaaagcactgaatttttcagaaaaatccatcagaagtcactttaaaagttttgatggctgtaatgaaagaacttttgggtctcagcaccataatctgaaatttcaggttttaggctcagcacttttttgttttgttttgtttgagacggagtctcgctctgtcacccaggctggagtgcagtggcacgatctcggctcactgcaagcttcgcctcccgggttcacgccattctcctgcctctgcctcccgagtagctgggactacaggcgcccgccaccacgcctggctaattttttctatttttagtagagaccgggtttcaccatgttagccaggatggtctcgatctcctgacctcgtgatctgcccgcctcggcctcccaaagtgctgggattacaggcgtgagccaccgcgccccgcctagactcagcactttttaaagaagagtgattcattacattaactgatactactttggaatgtgcaaaatcaccactgctttaaaacttgtaattttttctaagtgtttcacaagcatttgaaacaactaagtcacgtaaagtgtcttaatgtgtgttacaggaaaaccaactagcaaatttcttagcactaggagacttaattttggaggtcaggaactcaggaatagctagatgaattcaagcaaaatgcatttatttatttatttatttatttgaaatattttcttttactcttcagtctagcttgcaagcactcccaattattgacttctgttcttgaaagggcggttaatatttccttcccatcatatactttttaataagaccagctagaccttgcctgagtggtacagtgaagaggcactgggaatgatctaggttaagttcaacaacgacaaaatggttgaggaaaaatgactcagatcacaaaaaaattctgatctcccagttaatgttattgctctcaattagcttacagagacaccttaaatgtctcaaaagattctgtcagaaatccggtggctctcaagcatccccaacgtgctccaaggagagtagtatttctccaggcagcgagaacgggaaagaaaaacattaaggagtatcgttctgaagtccagcgtatgtttttggacatcatgaggaattgcttgccctccattccgttcagggaggccagttccccactcccgaggtgctgctgcccttgagggagttctcggctctcctgggcctcccggcaggagtccagccccagcacccggcgcaagtgtgagtgcctggacttctcggagaagttcctatccccaggagtgatttgcagaaccagagactcccttttcaggcttgggcaaagcagacgcctcctgctccgcatcggctcacacgcggccgggcccacgagcctcctccaaccgccgccccgggcctcggggctgccgctcccctcagcgtcggctctgcccccagaagcgaaggccgccctgcgcccggtcccggcctttccctgccctctggccggtcctcctcccgcggccgtcccgggacctgtgcccagacccctggggccacgatcacgccccagccgcccaagtcaccgcccctcccctcccttccagcgttcccgcccgggcggtgtatggtggctccggtgtatggtggttctcgcacgcacagccgcaggggtttcctctcctagactcgaggcggtggcgcacctgcaccctctaaaactcccccgtcggccctcgcggtctagcgggaggcgcggagggccgagctggggtgcgtgcgagcgggcgccaggaaagcgcggggccgccctaggggctaggcctttctttaaacagtgggaggcccacgaagtgtctgaagcccgaggctcccctttttgttttagttcgctctcttctggtaagagaataagggtcgggcaagaatggagaggggacagaaaaggaaggcagggcaactgaagaggcagagtcaacgcagaaggcgaagggagcctggaccagggcagggcagtgaggacgaagagtggagaggagagatccaggaggtggagcggtcaagacttacgtgggccgagacccgtctaaaatctcgtaggatgtcccccagggacactagccttgacctgtctttcctgctcttctccgccagaggcccccaaggcaacggtccagggaccttgcagcttgcctgggagatacacgtgcccaccgcagagactgagcccctgcttcacaactttaaacccagctcaaaagtcacgcactgtcctctcagacacctcccctgctatccaagtctcaaaggccctccctatgctcactttggctccggcccttacacatcccatggtggtttgttctcattcattttcttggttattcagagctgaatctccaacaacatgctattgtctagtacatgaaacagttaacaggaagtttccagaatcaatgagtacttttgaaaactggggtgactctcggtcactctaggaatttattatcactaaaaagaatgatgatgtttgatgcaaagacccaaactaaaaggaactagagagctgcccagagtcctcatctgccatccccctccacttccacaatccatcctgtcccaggcttggaaggtctttcaaaagaggcaaaacatcaagcaaagagtaattactaccttcgccctcacccaaccccagcttgcagtcattatggactaatcttaaaaaaagaaaaagtcaagctgcttgatgttaaaggtctcccatcttccaccaggctgcagactgaataaggcaagaaagcacaaatcaagcctaaactgaatgtaaaaaggatgcccagtggcaatgttgatatattttttctacaagttctgggtaataaataaggcacaaaaaagataactactgaatttacaaggtgaaaatatcagcaatcactactaataaaaaaggaacccacttacagcaacaacaaacctacctaggaacaataaaaaaaatgagaactccattaaatgaaaactgcacttacaatttgaaaggagagaaaagtaatgtaaattctttccaattttacttaaattaggaataaattcgcagagggagttggtgtctggaggaggcttgaataaattttatgctgaagttgacttaagatagtaagaatagcttgtatattttcaaacatggaaagtgggcatttgcttttcattaaaattcacaggccgggcgcagtggctcacacccgtaatcgcagcactttgggaggctgaggcaggcggatcacgaggtcaggagttcaagaccaacctgagaaacatggtgaaacctcgtctctactaaaaatacaagtcaggtgtggtggcacgcgcctgtaatcccagctactcaggaggctgaggcagaattgcttgaacctgggaggtggaggttgcagcgagccaagatcgtgccactgcactccagcttgggtgatacagcgagactccatctcaaaaaaaaaaaaaaaaagagaaattcatattagccagtaatgaaaatggcaaggtactagagcaagagtggaccccagtagttctgtatttagtcactaattttatactataattgcctagtattcaccagtgtaacagaatacccatctcagaaacagattcttttttttttttttttttttttttttgagacggagtctcgctctgtcgcccaggctggagtgcagtggcgcgatctcggctcactgcaagctccgcctcccaggttcacgccattttcctgtctcagcctcccgagtagctgggactacaggcgcctgccactgcgcccggctaattttttgtatttttagtagaaacggggtttcaccatgttagccaagatggtctcgatctcctgacctcgtgatctgccctcctcggcctcccaaagtgctgggattacagccgtgagccaccgcgcccggccagaaacagattcttgaagataatatatgagaaaggaaacactgaaagccaataagagctaattatccaaacaaagcttgttatttgcaaatatcaactcacctgacaccttatattaaat

SEQ ID NO: 317 - DNA, 361 bp, Homo sapiens
cacaaggagaacacaggaaaacaaggacacttaaagaaaaggagaaattggccaggttcggtggctcatgcctatatttcgaacactttagggggtcgcggtgggaggactgcttgagaccagcctggggaacatagtgtgaccttgttgctatgaaaaaaaaaaagaaaataagccaggctgatggcacatgcctctagtcccagcttcacaagaggttgaggtgagagaattgcttgacccagaagtttgaggctacagtgagttattattgcagcattgtactctggcctgggcaacagagtgagaccttgtctcttaaaaaaaaaaatgttttaggccaggcgtggtggctcacatc

SEQ ID NO: 318 - DNA, 6178 bp, Homo sapiens
  SITE (209): n equals a,t,g, or c
  SITE (443): n equals a,t,g, or c
  SITE (531): n equals a,t,g, or c
  SITE (533): n equals a,t,g, or c
  SITE (549): n equals a,t,g, or c
  SITE (729): n equals a,t,g, or c
  SITE (730): n equals a,t,g, or c
  SITE (738): n equals a,t,g, or c
  SITE (879): n equals a,t,g, or c
  SITE (1007): n equals a,t,g, or c
  SITE (1009): n equals a,t,g, or c
  SITE (1022): n equals a,t,g, or c
  SITE (1029): n equals a,t,g, or c
  SITE (1136): n equals a,t,g, or c
  SITE (1308): n equals a,t,g, or c
  SITE (1889): n equals a,t,g, or c
  SITE (1905): n equals a,t,g, or c
  SITE (2110): n equals a,t,g, or c
  SITE (3361): n equals a,t,g, or c
  SITE (3447): n equals a,t,g, or c
  SITE (3604): n equals a,t,g, or c
  SITE (3607): n equals a,t,g, or c
  SITE (3611): n equals a,t,g, or c
  SITE (3617): n equals a,t,g, or c
  SITE (3673): n equals a,t,g, or c
  SITE (3674): n equals a,t,g, or c
  SITE (3766): n equals a,t,g, or c
  SITE (4255): n equals a,t,g, or c
  SITE (4265): n equals a,t,g, or c
  SITE (4272): n equals a,t,g, or c
  SITE (4415): n equals a,t,g, or c
  SITE (4960): n equals a,t,g, or c
  SITE (4961): n equals a,t,g, or c
  SITE (5107): n equals a,t,g, or c
  SITE (5219): n equals a,t,g, or c
  SITE (5552): n equals a,t,g, or c
  SITE (5569): n equals a,t,g, or c
  SITE (5590): n equals a,t,g, or c
  SITE (5626): n equals a,t,g, or c
  SITE (5654): n equals a,t,g, or c
  SITE (5682): n equals a,t,g, or c
  SITE (5698): n equals a,t,g, or c
  SITE (6050): n equals a,t,g, or c
tcttaaggaacttataacttttatgggatccagtcctaaagtagattagaccgatgtagaattctgtctggagacgttctccccttcaattcaatgggaaggctcttttctggcatgaactctccgatgtctaatgagctctgagcaccatccataagctttcccacattctttacatataaaaggtttctctccactgtgaattctcncgatgctgacttagatatgagctttgactaaaggccttcccacactcattacactcatagggcttctctcctgagtgaatcctctgatgctgaacaagatgagcaccccatctgaaggccttcccacattcattacattcgaagggtttctctcctgtatgaattctctgatgctgaccgaggtttgagctctgtttgaaagttttcccacagtcactacacttatagggtttnctctccagaatgaactctctggtggacaacaagatgtgagttataaatgaaggttttaccacattcactacattcatggtctttcttncncctgtgggaatttccnttatggatgacaaccatctgcctgaaactttcctcctgggcaggggaccacctcagtctctccgctttgggatttctctgctgcagttctaaggtaccctcagaggtagcttcaaatgtagaggtgtcagtagcaagtttttctgagaacacctgtgattccacttcagtaatgggtggnnttgtggcnaatgatcctttgtccttgggctctgggccatcttctgtaacaactgacagaaaatgtaaatatacctgttctggatgtatgaagaaatgacacttagattaaaatgtatatttctggaatgaaaacaaatgcttaaaaacnaactatatatatgacaaacattcgaagaatatttactggatattgccaacagttatctcttggtgatgggactatacagaggagagggtttcttctttttaatttctcccatttatctgctttttttncnccctaatttctcncataatngaaacactaaagaagttttattgaaaaaatgaaagcaattacaatgcatggtctttttaggatttttcatattttcaaggaatcagggaatgatgttgtgaagaaangggaaaaacatgaaagaatcattagggttaaggaaaagggaggtttctaaaggcaaaaaaaactgtgcccttcctggctctgcaaccttcacctcttcccatccgtttcccagctgcatcaatctatagcctctttagaggactctcaactaactgcctcctttatcaaagnggaggacttccagctccctgcctcctatctgcttggtgctctctgcctttctcttccttaaaaagggaaaaagagtgtgttgccgggcgtggtggctcacacctgtaaccccagcactttgggaggccagggcgggtggatcacgaggtcaggagatcgagaccatcctggccaacacggtgaaaccccgtctctactaaaaatacagaaaattagccgagcatgatggcgggcgcctgtagtcccagctactcaggaggctgaggcaggagaatggcgtgaacccgggaaatggagcttgcagtgagccgagatcacgccactgcactccagcctgggcgacagagcgagactccatctcaaaaaggaaaaaaaaaaaaaaaaaaaaaaaaagagtgtgttgcctttttgtttttaaatgtccatagcacattttatgttttatctgttgtaatgctccctatagcctaaggagaacagaaaccaattgctttaagataactcaaggtcatttgactttttttttttttttgacagagtcttgctctgttgcccaggctggagtgtagtggcatgatctntggctcactgcaaccntctgcttccctggttcaagtgattctcgtgcctcagcctccccagtagctgggattacaggcgcgtatcacacctggctaatttttgaatttttagtagagacagggtttcaccatgttggccaggctggtcttgaactcctgacccaagtgatccacctgccttagcctcccaaagtgctgggattataggcgtgagccaccgntgcccagccaagatcatttgattttttaaaaattcattttttcaggttaaatgctgtggttaaaaaaatctgaaatatgcttgctatatataaaaaaaaaatcacacaatagctagcttctttttgagagtaaagtaataaaattgataaatgaatagaggcttactaaacagaagtaaaggagacaagaaaaagtctggaaaaaagtcaaggaagaaagaagagctaagaagtagaaacatacttttgggacagagtctaattaatctccatttctattttttcccattttgtaactaagaagaatttgatttttcaaatgccttggtttggtgatagtgatgggggggcagttatggtgtaaaagcaaatatcaagtagactcttcttggttagccgcatattcacaatacggtcacaaggctacagaggtcaacaaggagagttcacgcccctgaggctctaagtctagtgttcgccgctgggagagaggagaggttgtttgcaggtatgtatgcaggccaagaaggaagtttctgtagtgaatctgaagggtagaaggtgagggcacacataagagagtttcagatagggctgtttacatgaggaagaggtggtaaaggtgatgacaggctgtatctcacataggagtgctttatggcttaaaaagtgttttgcgaggcctcagcgagtttaaaaaaaaaaaaaggatctcaaggctggcctctagctcagggcagagttattatagactaggagttaagtgcagtggagatgataaggcataaatgaatgagctatttcctggtcctgatttagggctctctaaagttaagagatgctggccaggctttatatccagataagacccaagttgagcttaatcctcagagctatcttatgaggtagtttattcttactcctaattttatgagtgatgaaacaggcaaagtctctcacctaagagataagaatagtaaggctgtgatgataccaaacatttaagcacctactactatttaccctttacaggtactaggtactgtgccctttatagtccctctttctcctctccctccccacagaatcctgctcctcaccactctttgggaaaggctgggtctccttaggctggagctggatgctcagtgcttcctgggctgctcccagagattccttcttctcccatggctcttcctgtgcaggtccatgtgcagggcctgggacctggaggtgatcaggcaccactcnagtttaaattttcttcaaattactagtgtggtttctgtcccctgcctggacacttgcagatgtgaccctccttggaccaaagcttnccaaggagactttagagagcctcctcagagtcagcacaagggaagaagaggagctagagtctctttctcattcagggctcgagggcagaaaagacagacacagaaacacatactaactgctctacctggcccaagagaggtttgaacttggcacctnccncccntacagnctgcccctcggtccagcctgaaggtcatcaatctggctcccataacagaccaaatnncccccttcccacctgcggctctggttcaagtcctttctctaaatcctccagcacagtcacagcctcctctccactcttagggtgatgtcccncgcacccaggattggagctcctcaggcaggatggtcaagaattgttccagcaccaggaactccaggatctgctccttcgtgtgtttctctggcctcagccactcacagcagagtactcgtagttggctcaaggcctcccggggaccaggagtctcctggtagcggagatgcctgaagcgttggcggaagatctcttgactggtagagtggttcccaggtagcctggtctcatactcacaagactgttcctcttcctttggtcccatcatcatcatcttctcttgtccctgtgtaccctgaagggccagagtttcagctgctgttagtgatacagccatcctagtctgcactagctctgcagaaggctcataccagctggaatcttgcaagggccccctgtaacataagaagaaatcattcctcttttttttttttaagacagagtctttctctgttacccaggctggagtgcagtgacatgatctcagnctcactgcanacctccnacccccggggttctagcgattctcctacctcagcctcccaagtagctgggattacaggcgcctgccaccacatccagctaatttttttgtatttttagtagggacggggttttgccatattggccaggctggtcttgaactcnctgacctcaggtgacccacccacctcggcctcccaaagtggtaggattacaggcatgagccaccgcgcccgtcctcctcttcttttttcattcattaaacatatacatatactcaacactccaaagagccaaaccctgtcctatgccctgtagtcccgctttttcttccacccctccccagaattctgctgcactaagtcaatgtttttgagaaacttgcaccgtggtagaaacggggatgtaaagtggttttctataatacaactaattaaatgccattgacaggaaaaatgtatcaagaaaaaaaaagttctgggggcctatgggaagaaatgactattggaagaaataagtttgaagcaaaacccaagtttccagatgcagagcccagagccgagcagctttcagtgcaaggtggaatgtgttggggaggcagcctcctctgagatggctcctccctgctttcaaaaatttctgaagtagtagctacagcaaaagaaaaatataagtcccctttaaggagctggatctcattcaaatgccannaagccctattaaggggcagctatgaacaagtctcgggtacagtggcctgcgtcaaggaaatctaacaggtgtaaaccaaaaaagcatctgagataggtctcaaccaatttaggggttattttgctaaggttgaggatgcacccagngaaaaagacacacaagccacagtaggatccgtggctcgcacttttaccaaagagggttttgagggcttcaatttaatggggagaaagctggcaggaggggaaggaggagagnaagagggagggtatgtggtgaggtaagtggccacattcttgtgaggatttgattagagctcactgaatccacatgttgcacgtgaaaagaggaagtcaattatgaatttgtctcgtgctcagtaaatctgcattttacacaagataaggtagacatacagtagaggaagaagtcaaatatgctttgtctctgggtgggtggaggaacgatttctagtcttgtccggtgaagctcggctgttcgtttccattgccagggtgagggaggccacctgggggcatatgttgctttctatcttgcagctatcggtttaggaacaaaaggaaaagcagntttttttccgtgactcnagtttccaagcttaacttttnccctttgtcatagtaagtttggggtcctgagatttntattttcctttcacacagggaaggaggntggaacgcatcagaggccacgaaaggangcacaaagggggaccngctggcctaagacaaaggaggcgcgaggaaaaacgcggagctcgcgtctcccagggtgatgcccggcgccgctggccccagcaaaacttctctaccccggcctcgggcaggtgcccgcccggggagggggctgtcgtccaggccaggtacaactccccttcccacccttcactccctacccaagggtctcgagaaaagagaagaggaacatcaagacccccctccacggcacgtgacgcgacgcaacgcaggtagcgcagcgcgggcaccacgggcaacccaaacccctctccacacacaaccgcggagctgcctgccaggcctgctcactgcagagccgccgctgcctgcngggacgggcaaaagccaagccgccaggtggacctcggggaagccgccgccaacactcacctcacaggaccaggaggttccatcggggcgctgccgcgaatcgcgccacttacagccctcaccccaggg

SEQ ID NO: 319 - DNA, 186 bp, Homo sapiens
aaaaatacaaaaaaattagccacgcgtggtggcacgcgcctgtagtcccagctacttgggaggctgaggcaggagaatggcgtaaacccgggaggcggagcttgcagtgagccgagatcacgccactgtactccagcctgggctacagagcgagactccatctccaaaaaaaaaaaaaaaaaattc

SEQ ID NO: 320 - DNA, 6135 bp, Homo sapiens
gtggcttgcagctcggggtgggtggctcatttcctggccgctcctgggcttcgcggtgagggacgtgggcccctaggaagagggaggtggggttgggagcgcgcgccggacagtggaggagctccgctcctcggcctgcccatccccaggtcgcggccctttggcccgcgcggcgtctccaagcgactggggaactcagaggaggccagcactcaaactcctgctttccaaaggaaaacgcagttccgctgaccccgtgacttcgtaaatgctgcggtttaaccaaggatataaaaatagaagggctagttagttagttagttagtgcggccggactggttaaaccttaaatttgtaggctaaatattttaattcatctcttaacgttaaccgtagtgtgaggaatgaattttactcatctgtcctgacaaactaagggcatacattcctatcgatatctcgccatcctaaaagcaggtcaagtttggtctgtgtcacaacatttaatacctatttgttaccatattttgcttttgaacatttttagtcttgggatattctaagctttttcagaactgatacggatctctttgctgcttttgtgtatgtgatacctatcatgtttttgaacacatggtaagcattttacagatacgtcttggttcttggtcaattcctctgtagactcgtttattcataagcaaaaatcttaatgctcagtaagtgcctcagtgtttgttgaagtaattcggtaaacaccaaatgcgatcaaatgacaaatatccaatatttacatcaactcatgtttaatgtgaacttttaaaaaaacgttattactgccttaaatgaaaatcaacattacttgctttagatagaaagtaagtaaaaataaatgtttaaaatcagtattactaaattctgcctaaatatttttactcttggaagtctgattctgaagcctgtattttatttaaaagagagttctacaagttttattaatacatacatgttaaagatagacttttctccttgatacaatcagaattgaaagaattggaaaggaaattttctcactatgtgattgatgttaatgttgcattcacattcttaggcttctaaaatagttttttctaacattagtggtaggaattcttcataatgggagacactaattgaggttaatgatttttagtttatcatcacattattgttttatttagtgatagccccaaatctactccctttcaatatattactaaagttactcatctttcttattacaagtacttagagattttattgattgctgtaagttaactgcttttatatccttcaggaaagaagagattactcacactccttcgcaagcacagaaccagttgtactgagctttttgctaagctgtttcagccaagaatggctgtggaatctggagtgatttcaaccctgatacctcaggatcctccggaacaagaactaatactagtgaaagtagaagataacttttcctgggatgagaaatttaagcagaatgggagtactcaatcctgccaagaattgtttcgtcagcaattcagaaaattttgctaccaggagacacctgggccccgggaggctctgagccgactccaggaactttgctatcagtggctaatgccagagttgcacacaaaggagcagatcttagaactgctggtactggagcagttcctgagcattctgcctgaggagctgcagatctgggttcagcaacataatccagaaagcggcgaggaagctgtgaccctgttggaggatttagagagggagtttgatgacccagggcagcaggtgggaacggagaaaagtgatgtgggaaaaggaatttacagcctggagcatgtaatggtatcataacagtaggataaaaatttttatgtctctactgaaccctaacctgaagtgactaatagagccatacttgtctatacccttgaatggtctttttcccctgtccttcatccctggagatgtcatcattgacctctttgagatttttactaagcaagttttcttagggattttctcacaaagctaaccatattttactgatttcaggtcccagctagtccacagggaccagcagtgccatggaaggatttaacatgtctcagagcatcccaagagtcaacagacatccacctccagcccttaaagacacagctgaaatcctggaaaccatgcctttcccctaaaagtggtgaggaatgggaaatcatctggaaactcttgacacttaggcctctgtttttgagaatgcagaattaattgcacttgacaaacttgccacatgtgagcatcacctttattattctaaaccagaggtgctcgctttagcggctttgtattcacccctcatgaattgctgtcagccctcctgtgtgagtttccctgttattcattcattcatttcattatgttgtaactttataaagcgtcaatacatgtctggtactgtggtaggccccaggagaggtttcaggtctaggtgggtgatggacaaataaaaaggcagttgcaatgtagtaaattatagaatataagtaggcagtgggtactgttggagcacatctaaaggcacctaacccaatcttagaggatcaaggaacacttcctgaaggaagaaaatctaagctaagacttgaactatgagtaagagaaagccaggtaaataggtgggaggaggagtagcccaagtaaaggccataccatcccgaaggtgtgagaatataacccattctgaaaattgcaggtagtttaatttgacttgaatggagaattgacaggtggtaagagaagaaccagagaggaaaataggatccaagtcatgaagacctgtatgtcatgttaatttgtttgtatagtttcttaagtgcagtgggatgcagttgaaggattttggacaaggagtgacatagtttgatttgcagtttagaagttagctgcaaatggagaatcatgtaaggaaggcaagagtatagtcctattaaagactgctgtaatccaagtggccacagtgtattcaatcaatatgtgttatggtaagcggtggagaacataaaagctgactcctgttcaacagcatttaagttgttttgcaacatctggtaattattaaaactagagtgtgagggagaggagttgaggatgatactgaggtttcagtcttcaacagtctggttaatggtagtactgttcatgtgaatgagaaaacataaggaaaaacagatacatctgatgatgtgtttaggttggtacatttggtgcttgtgaaatattcaaaagtaaaatgcccaattagcataagactctagagcttaataaaatatggatataattggggatctgggcagacattagtcagacaatagcttacaatgtaagatgtaatggaagccaagggtagagagtttgtagagtaaggatacatgagagcccaaaacagaatctggaggaacgctcgtgtttgagtgatttaccctagaatctaagaaggaacagccacagaaatcaggctaatatcactggaagagaatgtctctagaaggaaggtgtgatcctcagtgtcaatgctacagagaggctaagtaataatctagaaagtacttagtggattaaagagctatgaagtgatcttgatgagagtagtatcagtggaagtaggggacggggcggtggggggcgggggaggacagtaaggcagaaaccagattgtggaatgaggatactttcacttgaaaggctgcagacaactctttcaagaaatcactatgagagagtgaggttgcgaaaccacttgagagagagtgaggttgcttgagggagatatgtaggcaagaaggttgattttaaaaggtgagagacacttaagcttatttaaaagctgatgaacaggaatcagttgagaaagagattgtaaatagtagaaaaaaattgtaggtaatttatcagttgatgtctcaaaagaggcaggaaaggatggaattcgaagtgtagatgtagactttattattagataagagagaccctcttttggccagttgaaaaaaaagatactggaggacagtgacatctttgtaggtagaagcttctgttttctctcatgtagaaagttttgacggtgacaagagaaatgtaatatctgtttttttgctacttattgtttcagattgtgagaacagtgaaacagcaacaaaagagggcatctcagaagaaaaatcacagggactccctcaggaaccttcatttcgaggaattagtgagcatgaaagcaatttagtgtggaagcaaggaagtgctacaggggagaaactaagatctccttcccaagggggcagttttagtcaagtgatcttcacaaacaaatctctaggaaagagagacctttatgatgaggctgaaagatgcttgattctaactacagactctataatgtgtcagaaagttcctccagaagagagaccttatagatgtgatgtatgtgggcacagcttcaagcagcattcctctctaacacaacatcagagaatccatactggagaaaagccctataaatgtaaccagtgtgggaaggcctttagtttgaggtcctatcttattattcatcagagaattcatagtggtgagaaagcatatgaatgtagtgaatgtgggaaagctttcaatcagagctcagccctcattagacatcggaaaatccatactggtgagaaagcttgtaaatgtaatgagtgtggcaaagcattcagtcaaagttcatatctcattatacatcaaagaattcacactggtgagaaaccttatgagtgtaatgaatgtgggaaaacctttagccagagctcaaaactcattagacatcagcgaattcacacaggagagagaccctatgaatgtaatgaatgtggaaaagctttcaggcagagctcagagctgattactcatcagagaatacatagtggagagaaaccctatgaatgtagtgaatgtggaaaagctttcagtttgagctcaaaccttatcagacatcagagaattcatagtggggaggaaccttatcagtgtaatgaatgtggcaaaactttcaaaaggagctcagcccttgttcagcatcagagaattcattctggggatgaagcttatatatgtaatgaatgtgggaaggctttcaggcacagatcggtccttatgcgccatcaaagagtccacactataaagtaatttgtgaatactgtgaatagtgtaaatacttcagtcagatttttaagtttgttagtcaaaagagtttactttggagcaaaactccataaaggttataaaatactaggtcttgagtctagcttgctttgtgcagcatttcccagtgctaatgtaaagtgtcccttgaaagcttttcctgtgactaatcagaacagaatacagaagaatcattacttccagctcttctcttattaggaatactcaggaaatacgaaaagtgggaatgtaacattgaaacctcattttgtatgaaagtgtcatgaatatagcaacccaggctctgtcactgcatctgattgttagtgtgccaggttatggggctggtgtggactgtgtgaggcacttcgtctcaggaactaaaaaaaaaaaaaaaactgacccaataaagaacagtgacagagcagcaggaaaggtggggaaatggcttcatcaatgatttgttgagcccagggcaggccaggaattagataggcatgagaagaaagaatataatttacccaaaggttattttttgagtacctactttgtcccaggaactaggaatacagtggaaaacaagactgtagtctctacagtctaatgggcaaggcagccagacaggcagtgaaagtggaatgctcctatgtgaccttaaggagcacctgactcagccttggataaggaaatgggggaaatggcctgaaggatgaggaggagttagccaaggtggtactctagggaagtggtaccccagtaaagaacagtagccaaaggccagaaacaaagtgtggagcattccttgagttcctgttgtagtgaggtcttgtctgtcagagaagtctgggtctggccagactctta

SEQ ID NO: 321 - DNA, 251 bp, Homo sapiens
ttttttttttttttttttttttgagacagagtctcgctctgtcgcccaggctggagtgcagcacatctcagttcactgcaagctccgcctcccgggttcacgccattctcctgcctcagcctcccgagtagctggaactacaggcgcccgccaacatgcccagctaaatttttgtatttttagtagagacggggtttcaccgtgttagccaggatggtctctatctcctgacctcgtgatccgcccgcctc

SEQ ID NO: 322 - DNA, 246 bp, Homo sapiens
cttaaaattcccaacgctctggatcagaagctgccatatcatttgtttctggggctatacgcccacaattcctagtacattcccttgggctttggtgctcaaaaaatatttgtcagttgctgggtctgtgacattctttgggcacctcgcacatgttcagttttgtcttatgtcaccagtatttcacaatatcttttgcaatttttttttttttttttttttttttgagatggagttcgctcttgt

SEQ ID NO: 323 - DNA, 5828 bp, Homo sapiens
ggcgctgccaaaactcatttttcattaacacggggtggggtcccaggctcaggcccccgggcccgatcatggccccagtccgcacagagcgcccggccctggccgcccgcagctccaccgctcagccagtgatgcgcacatccgtgcggcggcggatccgccgggcccgagccgcctcgggcaggatggcgagcagctgctcttgcaccagcatctccacgatctgctccttggtgcggatgtcaggccgcagccactggcgggacagctcccgcagctgccggaaagcctcccggggacccgccgcatcctggtagcggaactgccggaaacgctggcggaacgtctcgggaccgagtctagagccggcggggcctggtgtggagcgcgcttcagcttcggcctgaggcgctacgctcacgggtgcgggcccgagaggcagctccagggccgcggaggccgcagctcggggcgtagggatggcttcagggaccgcggcgttgggactggaaggctcaggggcaggcggtgaggcctctggcagcgaggagcccacacagttacgctcaggggctgagctcgaaccggctccttccagtttctccggtggcaccgccgcgggactcccagtggccgccaagatcggctccgtagccgccataactccagctccgggcgtcactctttgtccggtagctgtgtgctcagcactgcgtctgcgcgggggtggggtgagcagggagacgtttccggttaaagggcagagctcgcgtcacccttgagggagtcggactcgggaccggccgagagtgtgcggagcttacctgcaccagcgaagcgcctgcggcagccggaagcgaaagtctctggcttctctgcgtccaggtcggcgcgcgagcacccggaagccgcttgcgggctcccggaagcggcgccctctagcgttctcgagtcgcatgaggcggctgctgccctcgcggtgcgggagggcgagctgcgcgtggcctgggctccttccgaatggtggcgcctctgagcgccagttcgaggaggagtcggaggaggagcctgaatgtttggagatagacttcaagtcccggaccttatccgtgcgccgcttcggtttgcaggtgacctttgcgtgcgggcgccccttctgattgaccctgatgagctgtagctctgatggcccctccttcgggaatgattagggtgacggctggccggggctcgttcgagtggcgcccggccggtggtgacccgaacaggagagcgggacggcgaccattctctcgggaggggcccatctggagaaagtcctctcgcttggtcaaactaggagggcgatagcaccggccttactgcgacgatgacaaagtacaacacaccgtctggcgcgaaggagatgctcgagaaccctttgctgttgttatttttcgcgtgtcctccgaaaccaagggaaatgcggctctgtgggttctgttaacgtcagcatttaataagtgaactctaaatgcattgccccttatggtggccgctggcctcctgagttgactcagctcttgcaacgtagctagttgataaccctcgaaatatagcgaattgagatgtgctatattgtaaaatacgggacttagtacgaaaaaactgatgtaaaaattatctcaatactttttaatactgattacatgttggaatataatgttttgcatatattgggtcaaataaaaatgttattaatttcacctgtgtttttactttttaaatgcagcttctaaaaacatttaaattgcatgtgcagtttacattatatttctgttgagcagccttgggttagagtgttggagtgaggctaccttggtggaatcccctttgacgatacccagctcagagttgttaggaggattaaataaattaagccgttggagagaaagggcttttaagaagtttgctcttgtttttattaggtaaactgcttgctatctctgagctactgttttcttatcagtaaaatgtggatgtaatagaacttacctctcagaggtaattgagaattcagtgagatgatgtaggtaaaagcacgtggccctgacagccctcggccaggtggttttctgtttggtagctgactcacaaatagttttgtttttgtttttgtttttgttttgagactgagtcctccgcctaccgggttcaagcgattctcctccctccgcctcccgagtagctgggattacaggcgcccaccaccacacccggctaatattttatatttttggtacagatggagtttcaccgtgttggccagactggtctcgaactcttgacctcaggtgatccactctcctcagcctcccaaagtgctggcattacaggcgtgagccaccgtgccgggccacaaataggttttatatcctcattttacagaaggggaaactgaggccctcaaaggacaggggcctcatatgaaaggttttctatgaccttgcagtccttttgagcccgtgcaggatggaggagcaggtttaacaaccattaacatgccattagccctgatataaaacttacccctaccataggatgtttcctttggatgggtagaagtggaccctcatgaaatcatttccatagcctgaaaaccttgaaagtcgttgcagtgggcctttaatgttttttagttgctgacatgtaaaaattgggagatttcacatgcaaatctggatttctaatttttcttgaaaaaacggaagagctggccacactggacccaaattcctgctggtcaacaatcagctgacactgagtagagacgacttcctttagacaagatactctgtcccatttggtctcaatctcaaccattccctatggttctctgaaatagaatgttgtttgcatttactgttgctctcaggttgttgctttatttagagttgatatttttctctcttttctttttagaggtgagaaagcagggtcttagtgtttgttatgcctactggcttcaaaccttgacttctgtctggcccctcagtagttgggtttgctgcccagagtgaccaacagtgctattccctgtgtggtaacaggtactcagtttctaggcctaagggagcacactaacccttctgtggaggcaagaggtgatagaagtcttcactggggaggagacttcaagctgagactcaagaacaaaatgggtggggctcagggacattccaggtagaaggtactgcctgtacaaaggcacatagtgagtaggagcaaaactgtggaaactgcaggctatatgggaaagtggttgggatctggagaaggggtgagagatgaggttggaacactggtgggggttaaatcataaatgtcctagaattccatgtttaaaatttagttattatcttcttgtgaaagggaatgaacttttgtggcacctggaatcatgagatgttatgttagatctctagtctatttcttccatccctattgaaatcgtgaattattagagataggaggagggacctgagagatctattagaatcattgaatgtcagactggaagggcccttagaaatggaatttaaaaatccagccctttgtgggccggtaagcctgctttaaagtgattcagcagtaaaaaaataatgtggagggaataaatgaaacaagattggctcagtagttggccgggcgcggtggctcatgcctgtaatcccagcactttgggaggcataggcaggcggatcacctgagctcaggagttcaagaccagcctgggcaacatgatgaaaccctgtctctactaaaaatacaaaaaattagctgggctcggtggctcatgcctgtaatctcagcactttagaaggcttgaaagattggcagtatgtacactctactttggtatatgcttgaaaatgtccatgataaaagttaaaacattcagattcccagaatctgaaaaaaaacatataatgcctcttcttcgaaaagggatgcagttatctactttcatgtaatttacatatatccttgaaccctcccagaagtcccagattaagcttaaaatatacatttatatttcattcttttgaattttgcagattgagaaaccaagatgtcagaagatgaaggattggtccaaaataagaaagctagtaagtggtttcatgaggacagaaatcttttgacttttagtccaaactcttatcttattaggcctctttatccctagattgggagttcacttgggaagggatcataactcattcatctcatatcacttagcttccaacacaaggcctgactcctaggtagcttcagtgttgattaaaggaaagaggacaaatgtggattgcagaccatccctgagaaggcagagctctcatatgagtcccagactctttcagagacctcagtgccttttgatggcacttggttgttgagggttgtggaaaagaagcttggatacttattttcttttttatcagagccatcacactggagaatacgtcttttaaaaagcttttcattggccaagcatggtggctcatgcctgtaatcccagcactttgggaggccgaggcaggcggatcacgagttcaggagtttgagaccagcctggccaatatagtgaaatcccatatctactaaaaatacaaaaaattagctgggcatggtggcaggtacctgtaatccgagctacttgggaggctgaggcagaagaatcacttgaacccgggaggcagaggttgcagtgagctgagatcgtgccactgcactccagcctgggtgacagtgtgagacttcatctcaaaaaaataaataagttttttatttggaaataattatagattcatagaaggttgcaaaaatagttcagagaggtttcatgtacccttcagtcagttttccctaatggtaacatcttgcataactatagtacaatatcaaaaccaggaaattgacattggtacaatccacagactttattcacattttcccagttttacatacatgcatttgtgtgtgtgtgtgtgtgtgtaggtctatgcaattttatcgtgtgtggattaatgcaactactaccacaatatctagaactgtctgatcaccacagagatccctcgtgctatctctttataattgcatccattcatcttcccttcccctatccctaaccacaggcaaccactaatctattctccatgtctataactgtgttatttaaaaaatgttacatacctggaatcatatagtgtataatcatttgggcttggctctttccacttggcacaattccctggagattcacccaagtggttgcttgtatcaatagtttgtcctttttattgctgagtagtaatctatggtatagatgtaccatggtatatttaaccatccattgaaggacatttgggttgtctccacctttgagctgttacaaatagaactgctatgagttattttatgacatggctttgggtaatcacttatctttctgagcctggaaatagtaactaccacacaggatggttctgaatagtcgaggaggagaaatatatataagggaactggtgcagggtttggcacagaatatatacttcgtcatttttttaaaaccgatggttatgaagagataatacttccttgaatatgtaagttctagtatgtagtatttttaaaagtcacaggcattgatattattattagtgtattagtctgttctcatgctgctaataaagacatacccaagactgggtaatttataaaggaaagacgtttaatgaactcacagctccacgtggctagggaggcctcacaatcgtggtgga

SEQ ID NO: 324 - DNA, 681 bp, Homo sapiens
cttacccattgccacagtctctgggggtcccccttgaagctttccacaagggtcactgcctcttctccacttcctggacactgtttccgcacccacatctggatctccccaggcaggatggtcagaaactgctccaacatgaggatctctaggatctgctctttggtgtgaacctctggctgtagccactggaaacagagcttccgaagttgcttcaaggtctcatgaggcccagacatcacctggtaacggaactgcctgaaaagctggcgtgcggtctcagggctggagagttcctcttgaagggcagcatctgattctgagaactgggagtcctcggccttcgccagcgatggcagcaggcctagggcctgccccaagtcaacgggcattgtccagcctggcaagtccttttaagtaaagtgcttctgcagtggaattgtctccggcaagaactaggtcttcaccaggacactaaaaagggaatgagattgagtgctacacagaggaaggggacacattttcagaaagaacaaattcacatgccctacccgagaagccatggggtcaactatggagcttttgaattgctcaatggatacacgattctattttgaaagattataaacttgaagccacaagcaaactactgatactgtatctaaacagccaccatttccc

SEQ ID NO: 325 - DNA, 20020 bp, Homo sapiens
taagatagaaagtgactctgctaagtttatttcaaacaagggacacttgaagttagtttttcacccctatgacaaagaacacacgtgagctcacaggccctctatgcttctccccttctggaacagaagacctgctctagaactcattttaaggggctgatctgaggttcttcccataagcagtgactacagctaatcccattaaatgcttcccagaaagcacttctaaaactggatctccaatttagactttttccccgatgggtccaaaggaaggatgagtggaaacatgaagactattctttctcctgaggcagaatcaagaatttaagccattgtgcaatccaatccaagatatcctccaagtccaaagccatgtccagattctctcctctccaatccaagaaaaaaggagattaacaggggtatcctcttagacacaattcctcttgatggagctgagtatttttgtgactgggctgggagatagaaatggggaaagagagtttggttactggctattgaaagggcttctttcctaagtgggatctttgatgtttgtcaaggctcgagctccagctgaaacttttcccacagtgcgaacatttataaggtttctctccagtgtgaaccctctgatgtctattaaagtttgatctctgaatgaaacttttctcacagataggacatttatagggtttctctcctgtgtggattttctcgtggtggcgcaatcctgagaagtcactaaagcctttcccacagtaatcacatttacagggcttctctcccgtgtgagttctctgatgcttcacaaagtctgaactccgcagaaaggcttttttgcagatggtgcactgaaagtatgtctctccggtgtgagttctttggtgaaaaataagctgagaattcctataaaaggtcttcccacactccctgcaggtggggagcttctgggccatgggggctcttggctgccccttctgggaggtctctctcttctcctcaagccacatggtggacatttctcctgaatgaggattaggcaaatgctgacctagttgtttctcagaaatcctttcttgaggagacagctgttcccctgttccctcatcctgaatgttttgcagagcctcagggagattctctccttctccaaagcatcctggctcatcctcagtgaagaagcccctcaaggaagcctgagaaggaacctctcctgaagcttgacaggaagcatgcaggagctcctggtccctgtgattctccaaatttaggttctccttgtcattctcttgtctatctcctaaaagaagaaagaagatttgaaatggttcaagtgctatgccctgttttctaactcatatgtcaaagagagggtcatcataaaacattcattttcttttttttttttttttttttttttttagggcattagtaagtgagaaagaaaactaccatatggcccaaatgttcaaactcacttcccctgtcctgggttcaaggctaaatggttcagctctggagctgaggatttttaaacaacacaggagtactcataaagtgatcactccgtaaataaagccacatgtatttcttaaggaccaggaaaaaaacaagtatattataggcaactactgcttttaaagtgatttttatctgattatatataaaagataaatatggtaactaaaaaaaaaaactgaagagagagaaatatatacagaagaaaaccaaatccgcctcaatcttactacccagagataacaactatgagcatacatttcctttcagtctttttaatttaacctatatgtatgcaggtatatgctattttctgacataatttgtgtcatattgtacatatagttctatatctagctatggagcatttaattgtgaatggtggcattaatcaatgtaatatagagtctccctctcccattcataagacgcccaaaatctgtgaaatgcacgtgtcattttaccacagctgcaatgcagcggggctttactataaaagtgaatcccttgatctgtgcttgaatctagtatttacatgccctttattaaatcacactagcaactggaagtttgtttttctcatcgtaacttgggtttttggttatagtacttaatgatgcaaatagaaaatttttattttggtggtaggattttcaacttttataaattattttaactatatagatctaaagatgccatttacctttctctttcacatattagtgtcttttcaattgtctgccagggatctagacatcttctagagagctagatctgaacttgttaagtcaaaaagccttagaatgtccctgaatctaaaaataaaataaaataaaataaaagccttagaatatattcctctcaaatggcaaaggtactttctcgtgtttttaaaaaagcctttataaatatcattttaaagagctgagtaatggcccatcaagaagatgtcataataaacatataatttgttcccctaccatggaaatctaatttgcttattgtgtttttgcgactacaaataatgctgtgatcagcagttttcttcataagtttttgcccacatttctcatcaatatctcaaaggaatttctcaaagtagaattactgtgtcaacgggcataaatattaaggctcttgacacctactggcaacccaacttccagaacaactctgccatcctctcatatgtgaaattgggcagagggggaagtgggtattcaatacttaaatattgaatatttttaaacttatgccatttagatggatgaaaagtggtttttcattgttttaaattttaattcttaagttatgaaaggatgaatctttatcacatttatgagctatttttcatactcgaagactgctgcccatattttactgggaaagcacatttttcttatcaactttctttaactctttctatatcaacaaaaataatcatttatctgtcatggtcatgaaaactttttttttgagatggagttttgctctgtcacccaggctggagtgcaatggcgtgatcttggctcactgcaacctctgcctcccaggttcaagcgattctcctgcctcagcctcccaagtagctgggattacaggtgcccgccactatgcccagctaatttttgtagtgtagttagatggggtttcaccatgttagccaggctggtctcgaactcctgacctcaaatgatccccccgcctcagcctcccacagtgctgggattacagacgtgagccaccgcaccagcctgatcatgctaaattcttatacagaccagcatctcttttctaggctcccttttctgttctattgatctgtgcatctatttttatatcagaatcacactattttaatgattttttacctttataatacaacagacaatattttcagatctaacattcatgaaacattcttctttcaaaacatttttttaaaactattcttgcatgttatattcttccagataactactttaaaaactttaatcctttggatttttattagcagggtaagtatatggctttttgagactgccccctgctgacctgttttaactaggagctgttcttccatatggtcaactataacagcatattcactctctatattgacttttgcccctgatctgagtccagatttggtaaactggcaaactgttgtatttttcaaaccaggcctttcccatttggttactgtgacttccacaattattctaggtctcctccccggacagcccgactcctgcactgacttcctgcagacttctctcctccaagtgttcccttcctatctgtcctacacgttgctgccggattcatcttcctaaacctctttccacatatcctcttttttttttttttttttgagacagagtttcattcttgttgcccaggctggagtgcaatggcgcggtctcggctcactgcaacctccgcctcccaggttcaagcgattctcctgcctcagcctcccaagtagctgggattacaggtgctcacaccatgcccggttttttgtttttttttgcattttttgtagagacaggaacctataatagctttttttttttttttttttgcctatcaaggcaggatgacccttgtagactcctcacatctggttaaaggcagtatctaatgggaccatgtcagcagaggtgggatgaaggaaaaacaaacaaacaaaaaacgagtaggaatatagtgagctatatatagcaaataaggtcagactactaggagctatatgggaaatctctgcagcttccattcaattctactatgaacccaaaactcgtcttaaaaataaatcctgtccaaaaaaaaatcctactgcaacaacctccaaagcaatattttcaaccttttctgactacaacccactataagttctatggactaaactgtgatcccccaaattcatacgttgaaaccctagcccccagtatgatggtatttggagatggggcctggggccttagggagggattaggtctagatgaggtcctaagggtggagtcctcatgatgggattagtttcctgtctcctcctctccctctctcacctccccctctcccagtctctcccttcctctccgcctctcctctccccaacccccctctctgctatgtgaagacacagcaagaaaagcgaggtcagcaaaccatactggcaccctgatcttggacttcccaacctccagaaatgtgagaaataaatgtttgttgtttaagcaacttagtctatggtattttgttacagcagcccaagctaaggcagtaatcgatatattaatattgaaacacagtacatgcacacatattttaaacaaatatttcctgaaacactacccacccctacatctgatatttcctcttcaatcttattgtgtttttttttaacgctggttgtaactctatcaaatgatttcacgactcactaattggttatgcaatgcagtttgaaaaattctgttccagaagaaatccttgtgaaatggcctgataaatacgttgtgtaaaattaaaatcaaatatctcagctaatgattgctctctctgtggtatattagcaaaagaaaataattaattagatgccactggggagaaagaatggcttgccctacaattcccatccttggtcctcttcttcctctaaggttctgggatttactgtatatataaaagtgtgtgtgtgtgtgtgtgtgtgtgtgtgtgtgtgtgtgtgtaggtttcgcaattagtttttacgtaacttcaatgtttcagaaaaagtgtagaaagcaaagaatgactattttacaagataacaagttaagatttcttcttccctagtcttaaataaattatttatacgaagtatttgttgatgctgctgttttaagaagtgttaggtgcatagggattagataaaacatttttttctgtttgttttatgtctagatactctaacttcttgctaggaagggtaataatggctgctacataatcctttgcaatgaaattctactctatttgtattggtcttaatttgtgtgaatcttaattctttcagagaaagaaagctaaaataacagacaagattaaaggcagcaggtctgatgtgtggtcttccttccatagttaaatatgtgtcaacagccctatagccagagataagtagactcaatctcaatagttaaatcaaaccaatcagatcatggctagttataaccaacgtaatagaatattctgcctcccctgacctccttcaccacctccccaatcacctccaatttaatgacaggcagtcagaaatgattccagaccaatgaaagattactcacctatgcaggtgggtcttgggatcttctcattgacatgaaggtatattcctgccagctcttccccaaattctattgaattagtcaggtcagatttgggatgggaaatgcctgctatagagagaaagatgtatggtgggcctggatgaatagggaagactgggagctcaagctgtgtctttcaaaggagcaccctacgcatgagggaaaatatgaaggctctggacacttgcagaaactcaccttagaacagtgtgtggagcttgtaagacaccagtactcacaggatgaccttgacagatggtaaaggccatgaaaagaagagtctaggcaggtggacagaaaggtctgtagactacctggcaggctggtgtgagaatcatgatggggatcccaccaatggttggttgacaagtgtggtttagtagaaaagagcatggactcagaaccagccacagctgagttccatcataactcagcccacttatgagctatgtggcagtgggtaagtatttgatctgacactcactttcatcaggcttaaaatgagaataccatcatcaatttcatagattaaagaagttactccgtgcaatgtacccacaaacagttcctggcacacggaatactttcaatacaaggaagttcttactgttaattctgctagctccaacttgccccagttcccaactgtgtccctaacgatttctttcacctggcgattttcagttcagcagatgtctctataagtgcatggaaaatgcctcacagttttccagtccttctacctccttccatcagactaacccacaccctcacctcctgagaccattttcccataggtctccagcatgagatcccagtattgctccttttgagtggaatccagttgtctccactgttcctggaaaaaaaaaaaaaaaagcaatacaataccatgactccaatgaaggtgtttgaacctgccttccctgcctaaaggaaagctgagaagacagaaacgtgccataggatcctggccatcgcaagacctgagaaatcccagcagagtggttcaagggacaaagaggccaaagggaaaacaacagtccctatatcagtgtttctttccttggtaagaaaacatctaggctttacattctgcacctcttcaggtgaattatttaaaagtggagaacgtatagagggcaggagccttttccatactatttgtttttatttgggtttttttttttttttagatggaatctcactctgtcgcccaggctggagtgcagtggagcaatctctgctcactgcaacctccacctcccaggttcaagcgattctcctgcctcagcttcccgaggaagcttggactataggcacatgccaccgtgcctggctaatttttgtatttttagtagagatggggtttcaccatcaggatggtctcgatctcctgaccttgtgatctgcccgccttggcctcctaaagtgctgggattacaggtgtgagccaccttgcctggccggtactatttgttttttgtttttgtttttgttttttaactcaagtgcttgtactagacgtctttgaggaggaagagtctgatagtcccactatttaattaaaatcaggaaattcaaaaagcaaagaaagaagttaaaaaggaatctgttggaaaagcaagtgcgaatcagtaagatgtagttaagagtcaactgcattgtaagcttcaccctgaaacaaagattggtatattcagagaagagagagatgttatagccatacttgaaatatcttaaagttctgcatttagagtctaacattaaattagttttctttccagatagtggaaaactggtaggttctctggagcaaggtgtcccaatctccaaaagaagccctgcttttcctatgaaacgacagactggagactcaaaactgggaataccatacagctagggtctgctttcatgaattcaaatttcagtcttctaccaagaagctgactattagaaactcagattgtatagcaaagggattagcagcccattttttggagtcagacgtactgagttttaagtcccaacgttgccactttctagctgtgcaaccttgagcaagttatttaaccttccagagtttcaggcctcacctaatgatggcactgaactcaaaaaagtgttgtgaggtttgagataaataatgcaagtgtcacctgttttcatagcacactgtactttttttatttatagtatttatccatttattaactatttatgtgtatgtacaaatgtatgtgcacacatgtaagtatttgattaactgttgcctctactagcaatgtaagctccatgagaaaaggactctgtcatcctctccattgtataataccttcccagttcccaagaccctgtccaggacagaagaggcacttgatatatgttaccagggtgaaataaagcccttagcaaacaggtcctcagtagataatatatattattaccatcacatgcagtctcccagtctcaccccaagggtttgcagagagaattaagggattctgcacactttcagaaaccgcaaagtggatagacatgaatagccaggcttcagggaatagaaatgaggaaaggaactacaaagtcatcctcctactgtacacaatatactgtttggggaaggcactctctgatatgatttggctctgtgtccccacccaaatctcatcttgtagctcccataattcccatgtattgtgagagggacctggtgggagataactgaaccaagtgggcagttctttcctgtgctgttctcatcatagtgaataagataacatccgatggctttaaaaatgggagtttgcctgcacaagctctctctttgcctgccgccatccttgaaagatgtgacttgctcctccttgccttccaccatgattgggggcctccccagccatatggaattgtaagtccaattaaacctctttcttttgtaaactgcccattctcaggtatgtctttatcagcggtgtgaaaacggactaatacactctcagtcctaagtcaagtctgccccctagcacatcaaagggaagtggaaatggctcaaggagaaaagagataccaaaaactgttcaattagcaggtgctaagccaaacacacaaacgaaagagggtttggacttttttgggtgggaaggataggaagctgaaaagcgacctcaatatactgaattacacagtcaactattaactataaccacatttttaatgtgaactttaatttaaattttttaatttttaaagtataaacagctagcagcttattctgttaatcttctgtgaatgcagctattttaacaacctcctgaaaataatcacttgagcaaacattgctgaacacaggagttctcagtctttgtggtcagaacacatggaccttggcttcagtgctagcagagaaaaggatgcacttgccaagcacagtaatatctgcctggctgcctggcttgctgacacaggatctattccatgaacaccagaacagtaactaccaagaagagtacaaggcagaaaaggatacagccaccaaaacccccaagggtcaaaatcagctcactcaaaaaccagaaaagttgcttcaggagcactaacagggtacctccagcttaaaaacacaaatttactcaagaaactgccaagaagctgggtacttcgaataaaacctcctactgaagaggcaagacgccaatggcagccagcttgcctctttctcatatttagaagagacggaaaaacctaactttctatcctgaaagacagacacatgggatttgatgggaaaattctatttttgtgtggaactggcaccatcttgtgggtttataagatattacaactgacttacacttagttacacgctgttcctttcctttaagtctgaaaacaggggaaggtgagtaaatgcactgctggagtctatgtgaggttccaaccgagtcatggtttccactaatgaaataactactgtgtactgatagtaataccgtatcattattctggcattatttatgaagttcctcacttatttaagagattagagggagtgattaatttaaaaattccttttacttccaaaggattccattaaatatcaaagtctttctgatgcaaataattgctgttagtttggaggggatattcagattgggtagggacaacttttgttcatttgacttaaatggttgctaactagttatcatctgaaggtagggaaatacagacacacatatatatgtaaatacggttgtaaaaaacaaattggtgctgatgagcattttaaatcttttgactttaagttatccagaacaggtgaggatactctgtacctactacagaaacaacaataatcctccaagcctggttgacatattccacagaacacccaaatctttttcaccaagcaacatcttgcttaacaatttggtttctgggcaccttgaaagcaggcagaagggtacctttgattcactaaaaagatatttctctcccctgccacctccccatccaccttcccccagagtaaactatgaaattggtattctagtttttatatatctgagcctggagagctgaagctcagaccctggtctgaaacacagcattacctactgccttctctattttcatattcacgctacagcagattgcaaggcaagtcccaagaggagttccttcaacgttttaaatgatgttttaattaagatgtataggttcgtgaaaaaaaaattttttacaaaatacaacttttcaaaattgttaactaaatatcaacataaatctgtcccagagacttttatgtacaagcaaaaatgaagtattaggaattgttgaatttaccttctgcctgaaacaactaaaaatgggacaaaatgtatgaaacaatagttttcagacatttcacattacacaagcagagcagaacaagatccctgaaagtgggaaagcaaattcagtgagctctagttatccaaacttactgcctagacagaggatccaggcagcagcacaggaagggaaacccaggctgagccaggcagcctccctgagttgagcagaaggagctcagagtctggaaatgccaagatccttagaatcgacagggtagaaaaactggagagaaggaaactgcacaaagagaaagctccagagatctacagagcgtccccgcaaagtctggaaaataaccacccaaaagaatcagagggaacaatcccctgagttcacacagtgctggaaacagttcgtatttccaccaggcaaagtggaaaacctggtatatgaaggggcatcagattactcagaatactcagaagggaagtgccttagcatggaaagaataatcctcgactaaatgtttctctggtgccatgtaataaactgtgtccaaataactgcaccccatagcaaagttcaagaacatttatagtaatacaaaaatatatagcaccccaccaatgtgatacccaatcaaagattaccaggcacgggcaacatagtaagacacacaaaaatttaaaaattagccaagcaggccgggcatggtggctcccgcctgtaatcccagcactctgggagacccagctgggtggatcacttgaggtcaggagttcgagaccagcctggtcaacatggtgaaaccccatctctactaaaaatacaaaaattagtcaggcatggtggcacacgcctgtaatcccagctactcaggagactgaggcaggagaattgcttgaaccaagaagtcggaggttgtagtgagctgagatcgcgccactgcactccagcctaggcaacacagcaagaccctgtctcaaaaaaaaaaaaaaaaattagccaagcattgtggcacatgcctgtagttctagctactcaggaggctgaggcaggagtatggtttgagcccgggaggtcaaggctgcagtgagctatgactgcacaactgcactctagcctgggagacaaagtgaaaccctgtctcaaaacaaacgaaaaagacaaagattaccaggcatacaaagaagtgggaaaatacatctcataatgagaataatcattgatcaaaactgacccagaaccaatgcaggtagtaatcagtagataaggatattaatacaaatacaactatattccatatgttcaagaagctagagaaaaaattgaacacattaagtatagacatgaaagatacaataaagccccaaatcaaacttctagaggtgaaaaattcatctaaaatgaaaaatatactggaagagattaacagcagattagatgctgtgagatgaaaagactaatgaacttaaagacatcaaaatagaaactgtcctaaatgaaacaccaagacttcaaaaacagaatgaaaaatatactggatgagattaacagcagatcagatactataaaagaaaagattaatgaacttgaagacaaacagaaattgtccaaaataaaagaccaagacttcaataacagaatgaaaaatatactggatgagattaacagcagatcagatactataaaagaaaagattaatgaactttaagacatacagaaattgtccaaaataaaacaccaagacttcaaaaacagaaaaacaatcagtaagctgtgggacaacttgaagagctctgatacatgtatatacattatcattatacacattccacaggtattatttcccaagtccttaaaggagaggagaaataagcgagacagaaaaaaaaatgctttagaaataatggccaaaaattttccaagtttagtgaaaaccatacacccacagagctaggaaactcaataaatcccaattacatgaaatgtgaaaatgactccaaggcacatcaaaatcaaattgttttaaaaaatgagaatacactgaaataagcaaatatatatatatgtatatatatacacattatatgcataagaacaaagataagagtacatttggcatgattctatttttacaaaactctagaaaaagtaaactaacatatggtgacagacagcagatcagaggtttcctcaggatggagaatggggtgaagagaagcaggaggatgagattataaaaggtaaaaagtttccttttcatcgcttttgtacgtcagctcacctgaggtgctgctgggagcagtgaggctccgaggtcctggtctctgatcagcctttcctccagtcgggcaggctgggaggcagccagggctgaagtgaggagaggaagttttcagaatctggatgtcttccttaaccactccccagagggcgcagataacaatcttcacaaatcagaacaatacctgaacaatacctgtactgccatctatatttcaagacttgtgtttatctccctgacacactccaaccccctccaacattccagtctcacccatatgttctcccacctccttcctcagagccaaaatccaaatggtctggcccagtcataaagcagtttaaaacacagactttgactctccaaacaagagcggtttatttaggtctaacctgtttgcaaacctctcagggatacgccaatctgagcagcataccatttcaactcacttaggcctactaatcacaatcccaaaatctctccaagagaacaccacacagcaccatcctcacctagttctgcttctgtgtcagattcctctttcacgatgtggctcagaagctccccaggccctgaggatgaattctcaagtcccaactcctgaggcaccacttcaagatggggctccacttcccccacttggcagcttggagattccatcttctctgataagatgtcctgtcctagaacctggatactgatctagagaccatatattaattagtaattactgaagaatccagagtaaggatctctaaaagacacaaagcttactctctacaacagatcataagacaatttctaaggatgtggagaaagagaaaaccagcttttatttctagtccagcaggaaccagggaaagaaacgtcccaaaagacaccaaaagctgaggcccgaatcaggcgtgggagaccttcaagacatgccactaacgtgcttctactggatatgcgccaccaatgaaaactcaggcatcttttaaataacttctcaaacattctagtctaaaggtggaatgcgctgggagactttaccctcaatcctcaatagctaaagagtgttgagagtcagagagtgttagaattacgtgaggtatgggggaacccagctgtggtataataagaaatacacatttagtctttgtccccagttcccattcccgcagagctcctaaaaccctggtaatttcttgagggacaggtgaaagaagagtctttgttattcataaggagcccttctcaaccacacctgagtttatgctaggctcctagatagcttcaggatgggggctggttgccagaggaaccaaccttgagattaaaaggttggaactttcagtatctccacccagcttctgaggaggggagggcagctggagatactcaatcaccaacggcaaatgactgtatcaagtgtgccaaagcagtgaagcctccataaaaatccctaaaccatgaggttcaggaagcttccaggttggtgacctcatggaggtactggtaacgtagcacgccaggagaagcatggaagctccacgctctttcccccacaccttgctctatgcagctcttctctctggctgttaatgagttgtatcctttagagtaagtcagtaacaggaagtaaaatccttccctgagttctgtaagtcattctaactaattatcaaacttgaagagaagactgtgggaacctccgaatttatagccaatttgtcagaagtacaggtggcccctgggacttgtgactggcatctgagaacaggagcagtcttggattgagccctgaacctccagagttagcttcagaactgaattgctggacactgtactggtgttagagaatcacagaattggccattggtgtgaaaagccccacccattttgtgtcataagtggtatcagaaaaaagacaacacacctgatgggaccagagaggagccctgtgtttcactcgcagatcataataccctctgcttacccattgccacagtctctgggggtcccccttcaagctttccacaagggtcactgcctcttctccacttcctggacactgtttccgcacccacatctggatctccccaggcaggatggtcagaaactgctccaacatgaggatctctaggatctgctctttggtgtgaacctctggctgtagccactggaaacagagcttccgaagttgcttcaaggtctcatgaggcccagacatcacctggtaacggaactgcctgaaaagctggcgtgcggtctcagggctggagagttcctcttgaagggcagcatctgattctgagaactgggagtcctcggccttcgccagcgatggcagcaggcctagggcctgccccaagtcaacgggcattgtccagcctggcaagtccttttaagtaaagtgcttctgcagtggaattgtctccggcaagaactaggtcttcaccaggacactaaaaagggaatgagattgagtgctacacagaggaaggggacacattttcagaaagaacaaattcacatgccctacccgagaagccatggggtcaactatggagcttttgaaattgctcaatggatacacgattctattttgaaagattataaacttgaagccacaaagcaaactactgatactgtatctaaacagccaccatttccctgcccattttataatgttctttcttggtcttcaaatgtccagacaaaatgaagaataaaatgcaccatacgaaactttttcactataggtttccaggtaaacggctcttctacaaaacacttctacatcttcatctatatatctgcatactaaaaaataaagctggaaaaagatattaatgccctaggaataaaagctaatgcctacatgcttctgtaataaataggaggttaaagagaacaagttaagtcttccaaaaggtaccaaaagtacttccaaaagtataccaaaaaggtgtaatgaaacttccaagagaggtcttttgagtgccatattaaaataggtctatttgagaatttatgaaaaaaacaagtatcatacctgacactttcaaccttggggttaaagagggtgagaaggctgggcatggtggctcacgcctgtaatcccagcactttgggaggccgaggcaggtggatcacgtggtcaggagatcgaaaccatcctggttaacacggtgaaaccccgtctctactaaaaaaaaatacaaaaaattagccgggcatggtggcgggcacctgtagtcccagctactcaggaggctgaggcagaagaatggggtgaacccaggaggtggagcttgcagtgagccaagatcgcgccactgcactccagcctgggggacagagagagactccgtctcacaaaaaaaaaaaaaaaaaaaaaaaagagggttgagaagactaactaccttgaaaatactcctatggtgttgatataaataatcactattttatgtgaatggtatcaaattttagaagatcacaactaagacagtagaaagagaaatattaaatcgcaaataatattattctaaaaaggatcatccactacttctagttaactttcttgcaagtaatcacaatataggattactgggtaaatccttaaatgttatgaagaatttggtggtcatcatttctccctaagactaatcacagcaatttttaaaaaaagataccccatcacttgaggatctggcttaatcagagatcagtacaatactctagctttttgtagctgcttatttcttaaggtgtaggaaacaatgtcttcatccttaccgtttcaccaaaataatttatccgacattggaaaatcatttaaaaactaaaaaagaaaaacaattttttttcaagggcctgagaaaggaaaaagcgaagtcaaaagaattacagttgaccattgaataatgcaggagataggggcgccaaccccccacacagtagaaaatccatatataacttctgattccccaaaagcttagcagtctattgactgatgccttaaatagttgattaacatacattttgcatgttactgtatttttgtgataaagtaagttagacaaaatattattaagaaaattataaggaagaggccaggccaggtggctcacgcctgtaatcccagcactttgggaggctgaggtggctggatcacaaggtcaggagatcgagaccatcctggctaacacggtgaaaccccttctctactaaaaatacaaaaaattagccaggcgtggtggcgggcgcctgtgatcccagctactcgggaggctgaggcaggagaatggcatgaacctgggaggcagagcttgcagtgagctgagatcgtgccactgcactccaacctgggcgacagagcgagactccgtctcaaaaaaaaaagaaaaagaaaattataaggaagagaaactacatttactattcactaagtggaagtgaatcaccataaaggtggtcaccttcatcatcttcacactgagtagcctgaagaggacaaggaacaggagaaggagaaggaagggttggtcttgcagtcgcaggagtcacagaggcagatgaaaatccttgtataaatggacccttgcaaccgtaatccaataccaaatgttttttatgtggtcctcattaaatttattttttgcttaaaaagaaacccaggtctgagcgcagtggctcacgcctgtaatcctagcattctgggcgtccaaggcagggggatcatttgaggtcaggagttcaagaccagcctgtccaacatggcaaaaccccatctctactaaaaatacaaaaattaaccgggcgtggtggtgaatgcctgtaatcccagctaccagggaggctgagtgaggcaggagaattgcttgaacccaagggggcagaggttgcagtgagccgagatcacaccactgcaagaaaaaaaaaaagaaacccaggccaggcgcggtgggtcacgcctgcaatcccagcactttggaagccctaggcgggaggaccacctgtggtcaagagtttgagaccagcctggccaacgcagtaaaaccccatctctactaaaaatacaaaaattagctgggcatggtggtgcgcacctgtaatcccagcaactcaggaggctgaggtaggagaacagcctgaacctgggaggcggaagttgcagtgagtcaagatcgtaccactgcactccagcctgggcgacagagggagactccatctcaaaaaaaaaaaaaaaaagagtcagtgaagtcaaaaaatctgaacactatcaaccgacttgctctaattgacattttcagaacactagacccaagaactgcagagtatacattcattacaagtgcaaagagtattcatcaaaacagaccatatgcataattttcaaatgactgatatcttaaaattagctctaaaaatattacgcaaagtggtattgctaaaaagccattaaagcaataccaaaaaacactcaaaaacccaatatctgatagaaaaggaacacaagagaaacaaaaccagaaaggtcaaatggaaaactttagagcttcctgggttcaaatatattctctgatcatagtgcaattaaagtagaaatcaataacaataactagaaaatcccaatttatggaaattactaaataatgctcttaacccatagtcaaagaaaaaaatcacaaaggaaattaaaatatgttttcatactgagtgacaatgacagcattatcaaaccacctgaaaagcagctttagctcagaggtaaacctacagtttcaaataacatcttaaaaaacgaataaatatatttttaaaaataccttgctttgtaaatccaacctatttggctcaagagtttcaaataacaagcggcaagattttagatagcaagataccgacctgtaaacttactgcaatttatctgtttcctaaattaagatagcagtttagataatatttaagagaaatgacattttggaaaaactacagattttataaaatacttaaatcttttgttagtaatattatactcccaggtagtgtgtaagaaaaatgtctcgattattcaaaattaaattactttatatagtattaaaaatttaatagagtttatattccgataacctcatgaggaactgcccccattagttatgaaaaaaaaataaggttgtctgttatacctgttattaaacctttaacaaatagaatgaatttttaaaagtgcattctaggtgtaatatacacaagtggttacatacatggttacatatataagtaaccatttgttaagcacctactacgtatcggctcattattaagctcggttcatgtatttccaattcccacaattaccctggtgtacagatcaggaacctccgaggctcacaagtggcagccagattaacccaggaagctctaaagcctttgctttggggagaactgccaacgtctggtgatttgttggggcgttttctggttgtcacaagcagctaggggaactggcatttagtgctcgaggccagggcagcgctgctcattggatatgtattctccaccatgcgccccccaaatgccgactgcactctgatgagagagggagagactccaggcatcatcccatcgggtttcctcttccagagactcattttcagcccttaggggaagacagcggggaggagcccgttttcggtcccagtgcagagacccggccggtcccgcggggcgcagaggcgcaggaatgcagagccgggacggggttcacacatccccccgcacccacggtccactcccagccatggctgccccggccccgcactcgccacgtcccccgcgcgctcccagacgcatgggcaagggagcccgctggcccctccgtagctccggggtgcccagctgagtcaggtgcggacgcagatagcgcaaggcctgaccccgagcggccggaggccgggaccgccccgcaagcgcgctcacctcggcccgcggcgccggctccgggcgc

SEQ ID NO: 326 - DNA, 5250 bp, Homo sapiens
caggcctaaagaaggaggtggaagatggtgggaggtggaagatggtgggagggggaagtctcactgtcaggcctctgagcccaagccaagccatcgcatctcctgtgacttgcacctatacgcccagatggcctgaagtaactgaagaatcacaaaagaagtgaaaaggccctgccccgccttaactgatgacattccaccattgtgatttgttcctgccccaacttaactgaatgattaaccctgggaatttccttctcctggctcagaagctcccccactgagcaccttgtgacccccgcccctgcccaccagagaacaaccccctttgactgtaattttccattaccttcccaaatcctataaaacggccccacccctatctccctttgctgactctcttttcggactcagcccacctgcacccaggtgaaataaacaaccatgttgctcacacaaagcctgtttggtggtctcttcacacggacgcacatgaaatttggtgccgtgactcggatcgggggacctcccttgggagatcaatcctccgtcctcctgctctttgctccatgagaaagatccacctacgacctcaggtcctcagactgatcagcccaagaaacatctcaccaatctcaaatccggtaagtggcctctttttactctcttctccaacctccctcactatccctcaacctctttctcctttcaatcttggcgccacacttcaatctctcccttctcttaatttcaattcctttcattttctggtagagacaaaggagacacgttttatccgtggacccaaaactccggcgccggtcacggactgggaaggcagccttcccttggtgtttaatcattgcagggacacctctctgattatacactcacatttcaagggtgtcagaccacacagggacgcctgccttggtccttcacccttagtggcaagtcccgcttttctggggaagggtcaagtaccccaaccccttctcttgtctctaccccttctctgcttttctggggcaggggcaagtacccctcaaccccttctccttcacccttagcggcaagtcccgctttcctagggggcaagaaccccccaatcccttatttccacaccccaacctcttatctctgcgccccagtcccttatttccacgccccaacctcttgtctctgcgccccaatcccttatctctgcgccccaatcccttatttccacaccccaacctcttatctctgcgccccagtcccttatttccacgccccaacctcttatctctgcgtcccaatcccttatttccacgccccaacctcttatctctgcgccccaatcccttatctctgcgccccaatgccttatttccgcgccccgacccccccctcccgcttttctggaaggtaagaacccccgaaccccttccctccgtgtctctacgctctcttttctctgggcttgcctccttcactatgggcttgcctccttcactatgggcaagcttccaccttccattcctccttcttctcccttagcctgtattcttaagaacttaaaacctcttcaactctcacctgacctaaaatctaggcgtcttattttcttctgcaatgccgcttgaccccaatacaaactccacagtagttccaaatagccggaaaacggcactttcaatttttccatcctacaagatctaactaattcttgtcgtaaaatgggcaaatggtctgagatgcctgacgtccaggcattcttttacacatcagtccattcctagtctctgtgcccaatgcaactcgtcccaaatctcccgcctgtcccctcagtcccaaccccaagcgtcgctgagtctttctaatcttccttttctacagacccatctgacctctcccctcctcgcctggccaagctaggtcccaattcttcctcagcctccactcctccaccctataatccttttatcgcctcccctcctcacacctgctccggcttacagtttcattccgtgactagccctcccccacctgcccagcaatttactcttaaaaaggtggctggagctaaagacatagtcaaggttaatgctcctttttctttatcccagatcagatagcgtttaggctctttttcaccaaatataaaaacccagttcatggctcgtttggcagcaaccctgaggcgcttcacagccccagaccctaaaaggtcaaaaggccgtcttattctcaatatacattctattacccaatctgctcccgacattaactccaaaaattggaatctggccctcaaaccccacagcaggacttaattaacctcaccttcaaggtgtacaataacagaaaaaagttgcaattccttgcctccactgtgagacaaaccccagccacatctccagcacacaagaacttccaaacgcctgaactgcagcagccaggcgttcctccagaacctcctcccccaggagcttactacaagtgccagaaatctggccaccaggccaaggaatgcctgcagcccaggattcctcctaagccgtgtcccatctgtacgggaccccactggaaatcggactgttcaactcacctggcagacactcccagagcccctggaactctgacccagggctctctgactgactccttcttggcttaccggctgaaaactgacgctgcctgatcgcctcggaagccccgtagaccatcacggacgccgagctttaggtaactctcacagtggaaggtaagtccgtccccttcttaatcaatatggaggctacccactccacattaccttcttttcaagggcctgtttcccttgcctccataactgttgtgggtattgacagccaggtttctaaacttcttaaaactccccaactctggtgccaacttagacaacactcttttatgcactcttttttagttatctccacctgcccagttcccttattaggccgagatattttaaccaaatgatctgcttccctgactattcctggactacagccacatctcattgctgcccttcttcccaatccaaagcctcctttgcgtcctcctcttgtatcccccaccttaacccacaagtataagatacctctactccctccttggtgaccgatcatgcaccccttaccatctcattaaaacctaatcacccttaccccgctcaatgccaatatcccatcccacagcatgctttgaaaggattaaagcctgttatcactcgcctgctacagcatggccttttaaagcctataaactctccttacaattcccccattttacctgtcctaaaaccagacaagccttacaagttagttcaggatctatgccttatcaaccaaattgttttgcctatccaccctatgatgccaaacccatatactctcctatcctcaatacctccctccacaatccattattctgttctggatctcaaacgtgctttctttactactcctttgtacctgtcatcccagcctctcttcgctttcacttggactgaccctgacactcatcaggttcagcaaattacctgggctgtactgccgcaaggcttcacagacagcccccattacttcagtcaagcccaaatttcatcctcatctgttacctatctcggcataattctcgtaaaaacacacgagctctccctgctgatcgtgtctgattaatctcccaaacctcaatcccttacaaaacaacaaactcctttccttcctaggcatggttaatgcagtcagaattcttacacaagagccaggaccgcaccctgtagcctttctgtccaaacaacttgaccttactgttttagcctagccctcatgtctgcgtgcagcggctgccgctgctttaatacttttagaggcctttcctacaaggtctgagaaggccaccgtagtcatttcttcccttctgtcagacataattcctcagtttagccttcccacctctatacagtctgataacagaccagcctttattagtcaaatcagccaagcattttttcaggctcttagtattcagtgacagactaatggtctattaaaaacacacctcaccaagctcagccaccaacttaaaaaggactggacaatacttttaccactttcccttctcagaagtcagacctgtcctcagaatgctacaaggtacagcccatttaagctcctgtatagacgctcctttttattaggccccagtctcattccagacaccagaccaacttcgactatgcccccaaataacttgtcatccctactatcttccgtctagtcatactcctattcaccattctcaactactcatacatgccctgctcttgtttacactgccggtttacactgtttctccaagccatcacagctgatatctcctcgtcctatccccaaactgccactcttaactcttgaataaataatctttgctggcaggactatgctgaacctccataggcactctctaattagatgtcctaggtcctcccaattcttagtccttttatacctgtttttctccttctcttattccacttagtttttcaattcatacaaaaccgtatccaggccatcaccaatcattctatacgacaaatgtttcttctaacaaccccacaatatcaccccttaccacagatctcccttcagcttaatctctcccactctaggttcccacaccgcccctaatcctgcttgaagcagccctgagaaacatcacccattctctctccataccaccccccaaaaattttcgccgccccaacacttcaacactattttgttttatttttcttattaatagaagaaggcaggaatgtcaggcctctgagcccaagccaagccatcgcatcccctgtgatttgcacctatacgcccagatggcctgaagtaactgaagaatcacaaaagaagtgaaaaggccctgccccgccttaactgacgacattccaccattgtgatttgttcctgccccaacttaactgagtgattaaccctgggaatttccttctcctggctcagaagctcccccactgagcaccttgtgacccccgcccctgcccaccagagaacaaccccctttgactgtaattttccattaccttcccaaatcctataaaacggccccacccctatctcccttcgctgactctcttttcggactcagcccacctgcacccaggtgaaataaacaaccatgttgctcacacaaagcctgtttggtgttctcttcacacggacgcgc

SEQ ID NO: 327 - DNA, 5893 bp, Homo sapiens
gggcctctcccgtccattgttctcggtgccccacgggcttgagccggggtgaatctggaggggccgggccgagcccgggggcgctttcgcacgcgaagcaaccgctagagcaggacctggtctcccgagaggtgagccggagaggcaggcctggagccacgcggaccccgggcagtagcccgaggtgagggaatagtgggcctggagccagctgccggcagctctgctgggggaggggcgtcggggtcgcgctccgtatcctgcgggccctgcagccccgatttacgcgccggctccgctcagcgaaccgtcccggacgcgtctccctggcggagagctccttgcctctcctaccgagaagcgcaggctttggacgggaaggggcattcgacgacatcccgcgcagcgtacacgttttacagatggggaaactgaggttcagagggggcgtgtcgtgccccaagtcagaccgcaaattagctgacctggcacacttttcccaggctcccaagtaggaagagttctcttacaccatatgccagtatttcttctagtcatttgagtaaatacacgttgagagcttcggttttcccactagcttttattttttgtccttttttttttaagcttttgtcagcttttctccccttttcattgagggagggttgttagttgagtctttatgatgtagtaatgattttttaaaaaatttttttatttttgtagagactgggtctcactctgttgcccaggttggtcatgaactcccggcctcaagccatcttccctcctcggcctcccaaagtgctggaattacaggcgtgagctacagcgcttgggctaaaaataattttgtattgcttttataatattttaagtcgtttgcaattccactgctttcaatattttgtaggtgccgtcccgttcttttttcctgtgagttcatttttttttttttttttttttgagacggagttttgcttttgttgcccaggctggagtgcaatggcctgatctccgctcaccgcatcctctgcctcccgggttcaagcgattctcctgcctcagcctccggagtagctgggattacgggcatgcgccaccacgcctggctaattttgtttttagtaaagacgaggtttctccgtgttggtcaggctggtctcgatcttccgacctcaggtgatccgcccgcctcaacctgccaaagtgctaggattacaggtctgagccaccgcgcccggctgtgagttcatttttaaagggaattgaggacttactgtgtctatggtttttctgccctgctgattttgtgtttatccattattttcctatcagaaggattatcttaaatcattaatgattaatctttgtcaatataatttttaaaatattaaaaacatacagcgtaatgtgcagatcttaaatttcatatgtttgctcttgtgccgccattgccaaatgaagatattgaaaatttccatcatcccagaaggctcctttgagcccctttcctgtcattaccacctaaaggtagccattattatagcacagtttcttttcttttttttccttttcttttctttttttttttttttttttgagacagagtctggctctttcgcccagactggagtgcagtggcacgatctcggctcactgcaacctcctcctcccaggttcgggcaattctcctgcctcagcctcctgagtagctgggattacaggcgcccgtcaccatgcctggctaatttttgtatttttggtagagacggggtttcactatattggccaggctggtctcgaactcctgacctcaagtgatccgcctgccgaggcctcccaaagtgctgggattacaggcaaccacgccaagcctatagcacagtttctaatacatgctgctatatgggtgtgtcatagtttattagccattccctgctgctggatttttaaggactcgattttttggttatttttttaagataaagtactgaggggccgaggctggattggagagtatatgcatgttttaaacttcatacttaaagtatggtaataatgcagttgagatattgcctttcttccaaagaagctcagagtgctttgacatctgatccattgctgatccttaagatgcccccataaaaacagaaacatgagtgttattatctttattaggtggtcaccgagtttggtgactaagttgtatgttaggtcaaggtcacacagtgcaagtcgaaactgacttaggagagtcctcagtatttcagtcatgggtttttcccggggactttgcatttctgatactcattctttggtgttttggaaggaacaatgctgtattttttgtgcttgggatacttttttttttttttttttgagacggagtctcactctgttgcctgggctggagtgcagtggcgagatctgtgctcactgcaacctccgcctcctgggttcaagagattctcctgcctcagcctcccaagtagcaggaactacaggcccccgccaccacgcccggctaatttttgtatttttaatagaaatggggtttcaccatacctcaggtgatccgcccacctcggcctcccaaagtgctgggattacaggcatgagacactgcacccagccttcttttaccacagagagatgttttcaggaataagccattttttctttaagaagaacaggaaacgtctgttggtttgcatatgtaagggccacttggtggtctgacctgggcttttgtgagttagattgctttaggacagtctacctatggattatggttctcttttttgtttctcagcgggactacttgttgatatttgaggagggaagtgtcttacctgagagcctggctggagaagactgaggtccaaggcttgaagcctaagtgattgccccaggactgtggatgatggctgcagacatcccgagagtgaccactccgctgagctccttggtccaggtgcctcaagaggaagatagacaggaggaggaggtcaccaccatgatcctggaggatgactcctgggtgcaagaagctgtgctgcaggaggatggccctgagtctgagccctttccccagagtgctggcaagggcggcccccaggaggaggtgaccaggggaccacagggtgcactcggccgcctccgagagctctgccggcgctggctgagaccagaggtacacaccaaggagcagatgttaaccatgctgccaaaggaaattcaggcttggctgcaagagcatcggcctgaaagcagtgaggaggcagcggccctggtggaagacttgacccagacccttcaggacagtggtgagacgcagaacctcatagggagagggcgggagcacccttccaaggtagaggagtgtggtgtttcggaggaggagaaggtggtgtccaaggcagagtggggggctagcgccatccctctgctctgtctgcaggcagtcagcgtgttcatcagccttttagtgtcctcactgtgtgcaaagtcagctccagaagtgctaggagggccttagagctacatttgaattgtaagcacagtttttacttctgtgtttatttggagtggttgggaaggtgatggaagttaaacgggaggagatggagacccctggcaccttcacgtggttgtgcaagaaacatccaaatggttcttgcaattagagaaaacaatctgatattttcaacatgacttttttttcttttttctttttttttttttttttgaaacggagtctcgctctgtcacccaggctggggtgcagtggcacaatcttggctcactgcaacctccgtcttctgggttcaagcagttctcctgcctcagccttttgagtagctggaattacaggcgtgcgccaccacgcccggctaatttttttatttttcgtagagatggggcttcaccatgttcgccagactggtctcaagctcctaacctcgtgatccgcccacctcagcccccgaaagtgctgggattacaggcgtgagtcaccacgcctggccccaaagtggttatttttatgaaaccaagagaaatgacaagtaaaccagctaataactagggactttctgtggtataaagtaatcctgggctcttaaaatcgtaatttcaaacttgagctctttgcaatagttactctatttttttccggtgttactaataagtattgggattctggcttgccgtttaaccgctgtctccctcctggttttccattgtaaagtagactcacttgatgaccaaatgtttacttcagatgtgccttgagggctgtctcagggctcgaaggatatggctgcctttgtgctgatgaaaactacggaagttcagagaagggagcgtggagaggaaaggtcaggtcagagaaggcttcctggaggaggtgacacctaagcaggaggttgtagaagggagtagggtgtggcagctgagaggagctgtgctgagcagaggcttggaagggcagagccacggtggtttatacctttgggtgacaggagagctggcagattggagtggcaagtgtgtttttaggaagtggtaggaagtagagtttgggggaagggtgggtgagggcttggactgaatgttttgcctcagtgggttcttgaactagacccccaaggggcatggaaggaagcggagtttggcaacaggatgtaggtttgattagggtagtgagaggctaggggcaggagagcagccaggaagctcccttgtcttcaggtgtgcagtgatgggggtctgccccagatggggcacgtgtgagaaagaactgatagtcaccatggctagcactttccaagctctttctgcaagccaggaaatatgcttagcatctaatatggaaaactcatgtaatcttcaccaccctggaagataagcaggattatcatcaccagagatcccttaagatcatgtgcctttgtaccaggcagaaccaagatttgaacttatgtgtgtgaggacatagcccatgtttttaagcgttgtcatatgtatgattctaagagacacttcctagtgggtgttggaagttggggatgcagatggaattaagacagtgactacagagcatctggcctggaggattcagaggactgggaagagaagagaaggaaactgaaggggatttggggcagagactatcacaaactccagggactgggtgaatgagtagagctgtcctctggagaaagggactgacgccgaaggtctgcagtgacccagccctgccctgggcaccttcatgcttgtctcactaagaatcctgtgagtggctggcattgtcatttcacagataggaaatataagtgcaggaaactcacatggctgttgagtggtggagccaggattcaaacccagacctgtctctttctgcatggagatctcagttttgcttgaagcaaagtgcttgattttctttggccctgaaaaaataactgcattttattccttctattaaaataagcaaacctgtctccctattttacagctgtagctgtcgttgcttcccttccggtggaggtgaccagtttgtaatgaacttctggatctccagtcagatactatggaggagagagtgatggagggctgaggagaggcctcaggttgttatttggttggggaggcacagagcagaggttcaggtctcagcaggtgtcagaggtgattacagcccttcccatccaccttgcagcaggggctttgtgcctttcatctttaactgggcacctgagatgggaaccaatggggaccatcccagacacatgggtttgtctgtccctgacttctgcctctgagattgtctttgttggtctttgtttaataaacgccccgaccttcctcatgattgctcacagga

SEQ ID NO: 328 - DNA, 5768 bp, Homo sapiens
ccccacgggcttgagccggggtgaatctggaggggccgggccgagcccgggggcgctttcgcacgcgaagcaaccgctagagcaggacctggtctcccgagaggtgagccggagaggcaggcctggagccacgcggaccccgggcagtagcccgaggtgagggaatagtgggcctggagccagctgccggcagctctgctgggggaggggcgtcggggtcgcgctccgtatcctgcgggccctgcagccccgatttacgcgccggctccgctcagcgaaccgtcccggacgcgtctccctggcggagagctccttgcctctcctaccgagaagcgcaggctttggacgggaaggggcattcgacgacatcccgcgcagcgtacacgttttacagatggggaaactgaggttcagagggggcgtgtcgtgccccaagtcagaccgcaaattagctgacctggcacacttttcccaggctcccaagtaggaagagttctcttacaccatatgccagtatttcttctagtcatttgagtaaatacacgttgagagcttcggttttcccactagcttttattttttgtccttttttttttaagcttttgtcagcttttctccccttttcattgagggagggttgttagttgagtctttatgatgtagtaatgattttttaaaaaatttttttatttttgtagagactgggtctcactctgttgcccaggttggtcatgaactcccggcctcaagccatcttccctcctcggcctcccaaagtgctggaattacaggcgtgagctacagcgcttgggctaaaaataattttgtattgcttttataatattttaagtcgtttgcaattccactgctttcaatattttgtaggtgccgtcccgttcttttttcctgtgagttcatttttttttttttttttttttgagacggattttgcttttgttgcccaggctggagtgcaatggcctgatctccgctcaccgcatcctctgcctcccgggttcaagcgattctcctgcctcagcctccggagtagctgggattacgggcatgcgccaccacgcctggctaattttgtttttagtagagacgaggtttctccgtgttggtcaggctggtctcgatcttccgacctcaggtgatccgcccgcctcaacctgccaaagtgctaggattacaggtctgagccaccgcgcccggctgtgagttcatttttaaagggaattgaggacttactgtgtctatggtttttctgccctgctgattttgtgtttatccattattttcctatcagaaggattatcttaaatcattaatgattaatctttgtcaatataatttttaaaatattaaaaacatacagcgtaatgtgcagatcttaaatttcatatgtttgctcttgtgccgccattgccaaatgaagatattgaaaatttccatcatcccagaaggctcctttgagcccctttcctgtcattaccacctaaaggtagccattattatagcacagtttcttttcttttttttcctttacttttctttttttttttttttttttgagacagagcctggctctttcgcccagactggagtgcagtggcacgatctcggctcactgcaacctcctcctcccaggttcgatcaatactcctgcctcagcctcctgagtagctgggattacaggcgcccgtcaccatgcctggctaatttttgtatttttggtagagacggggtttcactatattggccaggctggtctcgaactcctgacctcaagtgatccgcctgccgaggcctcccaaagtgctgggattacaggcaaccacgccaagcctatagcacagtttctaatacatgctgctatatgggtgtgtcatagtttattagccattccctgctgctggatttttaaggactcgattttttggttatttttttaagataaagtactgaggggccgaggctggattggagagtatatgcatgttttaaacttcatacttaaagtatggtaataatgcagttgagatattgcctttcttccaaagaagctcagagtgctttgacatctgatccattgctgatccttaagatgcccccataaaaacagaaacatgagtgttattatctttattaggtggtcaccgagtttggtgactaagttgtatgttaggtcaaggtcacacagtgcaagtcgaaactgacttaggagagtcctcagtatttcagtcatgggtttttcccggggactttgcatttctgatactcattctttggtgttttggaaggaacaatgctgtattttttgtgcttgggatacttttttttttttttttttgagacggagtctcactctgttgcctgggctggagtgcagtggcgagatctgtgctcactgcaacctccgcctcctgggttcaagagattctcctgcctcagcctcccaagtagcaggaactacaggcccccgccaccacgcccggctaatttttgtatttttaatagaaatggggtttcaccatacctcaggtgatccgcccacctcggcctcccaaagtgctgggattacaggcatgagacactgcacccagccttcttttaccacagagagatgttttcaggaataagccattttttctttaagaagaacaggaaacgtctgttggtttgcatatgtaagggccacttggtggtctgacctgggcttttgtgagttagattgctttaggacagtctacctatggattatggttctcttttttgtttctcagcgggactacttgttgatatttgaggagggaagtgtcttacctgagagcctggctggagaagactgaggtccaaggcttgaagcctaagtgattgccccaggactgtggatgatggctgcagacatcccgagagtgaccactccgctgagctccttggtccaggtgcctcaagaggaagatagacaggaggaggaggtcaccaccatgatcctggaggatgactcctgggtgcaagaagctgtgctgcaggaggatggccctgagtctgagccctttccccagagtgctggcaagggcggcccccaggaggaggtgaccaggggaccacagggtgcactcggccgcctccgagagctctgccggcgctggctgagaccagaggtacacaccaaggagcagatgttaaccatgctgccaaaggaaattcaggcttggctgcaagagcatcggcctgaaagcagtgaggaggcagcggcctggtggaagacttgacccagacccttcaggacagtggtgagacgcagaacctcatagggagagggcgggagcacccttccaaggtagaggagtgtggtgtttcggaggaggagaaggtggtgtccaaggcagagtggggggctagcgccatccctctgctctgtctgcaggcagtcagcgtgttcatcagccttttagtgtcctcactgtgtgcaaagtcagctccagaagtgctaggagggccttagagctacatttgaattgtaagcacagtttttacttctgtgtttatttggagtggttgggaaggtgatggaagttaaacgggaggagatggagacccctggcaccttcacgtggttgtgcaagaaacatccaaatggttcttgcaattagagaaaacaatctgatattttcaacatgacttttttttcttttttctttttttttttttttttgaaacggagtctcgctctgtcacccaggctggggtgcagtggcacaatcttggctcactgcaacctccgtcttctgggttcaagcagttctcctgcctcagccttttgagtagctggaattacaggcgtgcgccaccacgcccggctaatttttttatttttcgtagagatggggcttcaccatgttcgccagactggtctcaagctcctaacctcgtgatccgcccacctcagcccccgaaagtgctgggattacaggcgtgagtcaccacgcctggccccaaagtggttatttttatgaaaccaagagaaatgacaagtaaaccagctaataactagggactttctgtggtataaagtaatcctgggctcttaaaatcgtaatttcaaacttgagctctttgcaatagttactctatttttttccggtgttactaataagtattgggattctggcttgccgtttaaccgctgtctccctcctggttttccattgtaaagtagactcacttgatgaccaaatgtttacttcagatgtgccttgagggctgtctcagggctcgaaggatatggctgcctttgtgctgatgaaaactacggaagttcagagaagggagcgtggagaggaaaggtcaggtcagagaaggcttcctggaggaggtgacacctaagcaggaggttgtagaagggagtagggtgtggcagctgagaggagctgtgctgagcagaggcttggaagggcagagccacggtggtttatacctttgggtgacaggagagctggcagattggagtggcaagtgtgtttttaggaagtggtaggaagtagagtttgggggaagggtgggtgagggcttggactgaatgttttgcctcagtgggttcttgaactagacccccaaggggcatggaaggaagcggagtttggcaacaggatgtaggtttgattagggtagtgagaggctaggggcaggagagcagccaggaagctcccttgtcttcaggtgtgcagtgatgggggtctgccccagatggggcacgtgtgagaaagaactgatagtcaccatggctagcactttccaagctctttctgcaagccaggaaatatgcttagcatctaatatggaaaactcatgtaatcttcaccaccctggaagataagcaggattatcatcaccagagatcccttaagatcatgtgcctttgtaccaggcagaaccaagatttgaacttatgtgtgtgaggacatagcccatgtttttaagcgttgtcatatgtatgattctaagagacacttcctagtgggtgttggaagttggggatgcagatggaattaagacagtgactacagagcatctggcctggaggattcagaggactgggaagagaagagaaggaaactgaaggggatttggggcagagactatcacaaactccagggactgggtgaatgagtagagctgtcctctggagaaagggactgacgccgaaggtctgcagtgacccagccctgccctgggcaccttcatgcttgtctcactaagaatcctgtgagtggctggcattgtcatttcacagataggaaatataagtgcaggaaactcacatggctgttgagtggtggagccaggattcaaacccagacctgtctctttctgcatggagatctcagttttgcttgaagcaaagtgcttgattttctttggccctgaaaaaataactgcattttattccttctattaaaataagcaaacctgtctccctattttacagctgtagctgtcgttgcttcccttccggtggaggtgaccagtttgtaatgaacttctggatctccagtcagatactatggaggagagagtgatggagggctgaggagaggcctcaggttgttatttggttggggaggcacagagcagaggttcaggtctcagcaggtgtcagaggtgattacagcccttcccatccaccttgcagcaggggctttgtgcctttcatctttaactgggcacctgagatgggaaccaatggggaccatcccagacac

SEQ ID NO: 329 - DNA, 373 bp, Homo sapiens
tttcaaatttctatatttaataaaccagcagaaaacaaacagcaaactgagaaagagtagcaactgctgtgacaaagggataattttcttaatatacaaagagctcttacaaataaatccaatttaaaaatgggaaaaggaccgggcacgtggctcatgcctgtaatctcagcactttgggaggccaagacggctggatcacctgaggtcaggaattcaagaccagcctgatcaacatggtgaaatctctgtctctactaaaaacacgcaaaattagccaggtgtggtggcgcacgccggtaatcccagctacttgggaggctgaggcaggagaatcacttgatccgagatcgtgtcactgcactccagcctg

SEQ ID NO: 330 - DNA, 373 bp, Homo sapiens; identical to SEQ ID NO: 329

SEQ ID NO: 331 - DNA, 326 bp, Homo sapiens
agtcttttcccacccctgaccccccatgctctatccccactccattcagaccagatcttgctctttcttgaacacagcctgtgcttttgtttttgtttttgtttttttgagacggtctttctacgttccccaggctggagtgcagtggtgccatctgggctcactgcaacctcccactcctgggttcaagtgattctcctgcctcagcctcccaagtagctgggattacaggtgcgtgctaccgtgcccagctaatttttgtatttttagtagagacagagtttcaccacgttggtcagactggtctcgaactcctgacctcaggt

SEQ ID NO: 332 - DNA, 1888 bp, Homo sapiens
ctactcccctgtccttgcagtacatatgaactggctgctatgagtgggggtggggaattggctgaaggtagatgccatggaacaggaaggggcacaatgttttctgtccccatgaacagagcaaaaagtgaggtattggtgaaaaaagtttcctcagaacagtttctctccagtaacctctctaccactggtcccttgctgcaaatgtgtataaaacaattttaggacaaggaaatggcagaacaactttatggacaacatataaacttgggaggacttataataccataaagcattacatgctgggattttaagtcagtttaaagctacattcaagcaaattctaggaagacagaggctgaaaagtactaatagagatgccagggctgttggcaaggagggtaaccacatttcatcctggggcctcaggttagagaactgtgtattctttttcaattaaaccgacattcctagcaatatggtatgttgcaaatgcccttccaaaagaatcatgccaaccaagatgagggagagttaagggttgtatatacaggcaagaagtaggtttgaagacatttaggatttcactttcaagaaagaacactgtgccacaaagagattccaagtgcaagagtttgaacctgagggggtaatacaggtggtgtgtgttaaggtggaaggggctgtgggatatgacagaagtgcctggtcaggaaacagagccaggtgtttttacattttattagctacagtatagatcctagagctgcctcattccctcccctcccctcccctccccccaccatggggtcaggccttgccaggagcccctgcctttgctgcctgggcccgctggaactcctgctgcagctgagcaagggtctccctctgttgctctgactgccgctcaagatcccgaagctgggattcgtatcgcttactaaggagagacaagggagacaagcagaaagggagaaattagtaggacttactatggagagtgctaaacgcaagaaagagataggtggaaaacttgagatccaggggagggagaagaaggggggttaaaagggaaggaaagggttggaggaactggaggactaggggccactatggagagctgttctgcaatggttcaacacctctactccaatggttcacttgcatcacagggtgcagcacacggtggtggaataaaaactcacatttcagctgtgatatagtccagcctcttccctactgtggcccgagcctcccccagctcctgtttgactagcaccggacccagaagtttaaagaccacgttggacccatccagcagggccagttcctgatggagggatgggacatatgtgatcagaaccatggctagtacaggtccctcctcgccccacaaatcccagtccctcacctctttcacgatattattttctgttagttgtgcttcaagtttctgcctccccgacatggatttacttaagtctggggatgagaggaaaggcaatttagaaacatcaaatgtgccacctatccccacaatcctagtcaggtggatatggatctgaggaagcagaaaaggatgggggcagcgggtgagtgaacagggaagagtactgagactgaggcggggaagtctctgcacgcgagggcccagatggggcaacaaaccttatctcggtaatggctttgggttgtaagtgcattgggcgagaccataccgaccctgttcccttacccttctgtagctgttgatatttctccacttctccctgtagcttcttctggatcagctccgccatggcggggatgaaagcctactgggtgcgagacaagggcgctgggtctcactctctggaaggtacctgagctcccttttctgatctggcct

SEQ ID NO: 333 - DNA, 7736 bp, Homo sapiens
gctacccctagtcgctgcctctggcttgctgcctctcgcttccctctcctgccctttgtaccctgcttctctgtcgtgtgtgggttcagctctggggagaaggggctttgggggtctccaggatcagaattcctgtactccatccacgcctccactgcagccccttcgactccaccggggccctgaggcggctggggtggggctgtctgggccccagtgggggagacctggggtcaccagctcccccaacccttcctcgcactcgctggtactatgccctgccaccacaggtgaggggtacagagggaggagcagggcctggggtgaaggctgagggcaatggggggtggtgtggaactgtctgacttccccttccttgctcctccaggcccctgtgtccgtctgggatgaggaggaggatggtgccgtgtttaccgtcacaagccgccaatatcgacctcttgatcccttggtgagatcatgactttagcttctcacctctgactcttcattcccagttttccttcctctggctgactttctggccagagtgctaggttggagttctggagtcctggactctgctgtgtgacataggccaagactcttgccctctctgaatatcagaaaaatgagtctggaacatctcctgggtctgggattgtcctcagaaatctaggtgcagagtgggagaaagggttagcgatcatctctctgtgttctccaggtccctatgcctcccccacgttcctcccgacggctccgagctggcactctggaggccctggtcagacacctactggatacccggacatcagggactgatgtgagcttcatgtcagccttcctggctacccaccgggccttcacctccacgcctgccttgctagggcttatggctgacaggtcagagtcataagggacgcagggtagtggagtatctgcccggatttcctaaagccgcaacatcccaccaaaatagtcaaagccactgagggtttgggaaaaatggacagatagatcctcttctccccctcaggctggaagcccttgaatctcatcctaccgacgaactagagaggacaacagagtgagtgacccctggttcttaatctcacagtcccctctgcccaggctgcagctttacctctcacccttggctgattcccttctcccagggtagccatctctgtactgtcaacctggctggcctctcaccctgaggattttggctctgaggccaagggtcagcttgaccggcttgagagcttcttacttcagacagggtatgcagcagggaagggtgttggggggggcagcgctgacctcatccgcaatctccggtcccgggtggacccccaggcccccgaccttcctaagcccctggccctccccggcgatccccctgctgaccccacggatgtcctggtgttcctcgctgaccacttggccgaacagctgaccctgctagatgcggtgagaccctgacctctggcccctatgccccctgaccccttactaacctctccttgactccagatcctttccttgcttccaccccttcctgatccagctcctagcctcctccacctaccattttgattctccccttttccctttggtcgttacccttcaaaccctgtgcccctctggttccttggccacctgagatcctcagatccctgatattggaaggctgacctcacttgactatgaactttaacctctgacctctaccctgcaggaactttttctcaatttgatcccctctcagtgcctgggaggcctgtggggtcacagagaccggccaggacattctcacctctgcccatctgtccgagctactgtcacacagtttaacaaggtggcaggggcagtggttagttctgtcctgggggctacttccactggagagggacctggggaggtgaccatacggccactccgtcccccacagagggcccggctcctggagaagtggatccgcgtggcagaggtgagagagaagattgccctacggtttgtggccatggaatggagaggcctcccatagccttagctctcttctttgacccccacaggagtgccggctgctccgaaacttctcttcagtttatgccgtggtgtcagccctgcagtccagccccatccacaggcttcgggcagcctggggggaagcaaccaggtgcggaggctgaggcattggactggggtgggggttcctcagaaggcggggaagagggggtgacagagccaggcctgtcctcagggccacttttctcccttccccagggacagcctcagagtcttttccagcctctgccagattttctccgaggaggataattattcccagagtcgggagctgctcgtgcaggtgagagcctggtttgtggcattcccacctctccttgttccctactgctcccccatgtctcttttattttgtcaccaccaggaggtgaagctgcagtctcctctggagccacactccaagaaggccccgaggtctggctcccggggtggggtgagtgactagcggggtggtgggcgtgggggtggtgattatgaaggggtgaggagtatgttttgggggagcagcctgaaggatgggtaagggaggcacagaggggtgaggagaatgaaatctgttctctgaggcaatgaggagggcaagtgcggagggatggagggccctcacgtcaatggcaggcacttctgaccctgacccctgacttcagggtgtggtcccataccttggcaccttcctgaaggaccttgtgatgctggatgcagcctccaaggatgagttggaggtcagtggtgtgtgtgtgtgtcattgcaatgatgtaacaagtgggctgcagggtcggacagacccccccgccccttgcaaggggctgtaaggcacaaatagctgagtgtgggacagagccagatctgtttctgtgccaagtcgcctcagtgatctgtaaatgggaaactagaaatagcatctacattgatctgttataagggttaaatgaatttgtatttgtcaagtgcttagaacgtgcctgaaacgtaagcacatctaggttttgtgatgggctcctgctctattgctagagtttgttaaataaacaaatactgagaccttggacaagttccttatcctctctggataaggaatcctgtcgaattggatactatccagtcctctcatctgcaaagcagactcgttgtctacctgagaaattcaatttaaagggtcaagtggagtgcttaggccatgatagattgaggaggaaggcagggagggatcgaagagtcagagaggctggagggaagtggttgtgagttggatgtggctgtgtgtgtttaagagaggggatattctctctctgtggccggaaggtagggttggaactttcaccccatccccattttcctcgcagaatggatacatcaattttgacaagcggaggaaggtgagcggagtgtctgggctggatgctggacttccctatccatgttccaggaaggggagggggaaaagtcaggggtccctgagttttggctcctgcagtttgagggctccttcccaggagtttgcagtcctttctgagttgcgacggctccagaatgaatgtcgtggctataacctccaacctgaccatgatatccagaggtggctacaggggctccggccactgacagaggctcagaggtgactggcgggtgaggttgggactccagggttctggccaggtgtgggggattggtgtcatgtcctgagctctgcctattgcccccctaacccagccatcgtgtatcctgtgaggtggagccacctggttccagtgaccctcctgccccacgggtgcttcggccaacattggtcatctcgcagtggacagagtgagagattcactggctggggggtggtttcttgggacttccacttttctctgatcctcccaatctcctgccactgcagggttttgggctctgttggggtccctaccccgcttgtgtcctgtgaccggcccagtactgggggagatgaggcgcctacaactcctgctcctctgctgactcggctggcccaggtgagctctgctcctgactctgaccttgacgctgaccctcactctgtaaatgtttcttccttaaacctccctgccttcatgccagtcccatgttgtttgttcctagcacatgaagtggccatctgtctcgtcactagactctgccttggaaagcagtccatccctgcacagtccagctgaccccagccacctctccccaccagcctcctcccctaggccttctcgaggtcaccgccgctcagcctcctgtggctccccgctgagtgggggtgcagaagaggcctccggggggactggatatgggggagagggatctgggccaggggcctctgattgccgtatcatccgagtccagatggagttgggggaagatggcagtgtctataagagcattttggtgagggagccttgggatggagttggggtgaaggatggtgtcttgttggactataaatgttgtctgaggtttgggcagccaaatggaattgaatgtagttttaattttgacctttggttttggcagttatgttttatttttaattttatcttctaaactctagtcttcaatagaagctgaaatttgttttattttgatggctattttgcattagttgctacaccttaaacttttggtcgccgtgttaaaatttcagaatcaacagcagtttccccacagggaagcagctctgtttcactgggcaccatgtgggctggcttatggggtataggaagccaccatattgggttttcctgttcattttaaagccttggacacaagtaacattttgtggttgggttcagtggctgagggtagaaggatgggaaatcatggctgattgattgctcttttggtctcctgttctgccaggtgacaagccaggacaaggctccaagtgtcatcagtcgtgtccttaagaaaaacaatcgtgactctgcagtggcttcagagtatgagctggtacagctgctaccaggggagcgaggtcagaggccatgagggaaaggcagactcgggaggagagtggagtacttccacatctgggcggctgtggggggaacaactgtgtgtgtgctttacatccatcccctgaaccttcagagctgactatcccagcctcggctaatgtattctacgccatggatggagcttcacacgatttcctcctgcggcagcggcgaaggtcctctactgctacacctggcgtcaccagtggcccgtctgcctcaggaactcctccgagtgagggaggagggggctcctttcccaggatcaaggccacagggaggaagattgcacgggcactgttctgaggaggaagccccgttggcttacagaagtcatggtgttcataccagatgtgggtagccatcctgaatggtggcaattatatcacattgagacagaaattcagaaagggagccagccaccctggggcagtgaagtgccactggtttaccagacagctgagaaatccagccctgtgggaactggtgtcttataaccaagttggatacctgtgtatagcttcccaccttccatgagtgcagcacacaggtagtgctggaaaaacgcatcagtttctgattcttggccatatcctaacatgcaagggccaagcaaaggcttcaaggctctgagccccagggcagaggggaatggcaaaatgtaggtcctcgcaggagctcttcttcccactctgggggtttctatcactgtgacaacactaagataataaaccaaaacactacctgaattctactcccctgtccttgcagtacatatgaactggctgctatgagtgggggtggggaattggctgaaggtagatgccatggaacaggaaggggcacaatggtttctgtccccatgaacagagcaaaaagtgaggtattggtgaaaaaagtttcctcagaacagtttctctccagtaacctctctaccactggtcccttgctgcaaatgtgtataaaacaattttaggacaaggaaatggcagaacaactttatggacaacatataaacttgggaggacttataataccataaagcattacatgctgggattttaagtcagtttaaagctacattcaagcaaattctaggaagacagaggctgaaaagtactaatagagatgccagggctgttggcaaggagggtaaccacatttcatcctggggcctcaggttagagaactgtgtattctttttcaattaaaccgacattcctagcaatatggtatgttgcaaatgcccttccaaaagaatcatgccaaccaagatgagggagagttaagggttgtatatacaggcaagaagtaggtttgaagacatttaggatttcactttcaagaaagaacactgtgccacaaagagattccaagtgcaagagtttgaacctgagggggtaatacaggtggtgtgtgttaaggtggaaggggctgtggggatatgacagaagtgcctggtcaggaaacagagccaggtgtttttacattttattagctacagtatagatcctagagctgcctcattccctcccctcccctcccctccccccaccatggggtcaggccttgccaggagcccctgcctttgctgcctgggcccgctggaactcctgctgcagctgagcaagggtctccctctgttgctctgactgccgctcaagatcccgaagctgggattcgtatcgcttactaaggagagacaagggagacaagcagaaagggagaaattagtaggactcactatggagagtgctaaacgcaagaaagagataggtggaaaacttgagatccaggggagggagaagaaggggggttaaaagggaaggaaagggttggaggaactggaggactaggggccactatggagagctgttctgcaatggttcaacacctctactccaatggttcacttgcatcacagggtgcagcacacggtggtggaataaaaactcacatttcagctgtgatatagtccagcctcttccctactgtggcccgagcctcccccagctcctgtttgactagcaccggacccagaagtttaaagaccacgttggacccatccagcagggccagttcctgatggagggatgggacatatgtgatcagaaccatggctagtacaggtccctcctcgccccacaaatcccagtccctcacctctttcacgatattattttctgttagttgtgcttcaagtttctgcctccccgacatggatttacttaagtctggggatgagaggaaaggcaatttagaaacatcaaatgtgccacctatccccacaatcctagtcaggtggatatggatctgaggaagcagaaaaggatgggggcagcgggtgagtgaacagggaagagtactgagactgaggcggggaagtctctgcacgcgagggcccagatggggcaacaaaccttatctcggtaatggctttgggttgtaagtgcattgggcgagaccataccgaccctgttcccttacccttctgtagctgttgatatttctccacttctccctgtagcttcttctggatcagctccgccatggcggggatgaaagcctactgggtgcgagacaagggcgctgggtctcactctctggaaggtacctgagctcccttttctgatctggcct

SEQ ID NO: 334 - DNA, 130 bp, Homo sapiens
gggattggagctgctaccttcgggggtcccttagggctgagatagtggaggcgctacccgagggaccagggtgaaaggggtcctgaaaaagactaattctctgggctggtatagtccttggccgggaggg

SEQ ID NO: 335 - DNA, 10139 bp, Homo sapiens
ggagttttcaagccgactgtgtggcagctgagaagagttttgcacgtggatcgccgttcgggtgggcgagatggagacagcccccaagccgggcaaggatgtcccgcccaagaaagacaaacttcagaccaagagaaaggtagaggcctccctgggtgggaaacgaatttttagctgtggggtcggggggcggggcgtgagtgcggagttcctgatgtgcctgtagaaaccgcggcgatactgggaggaagagaccgttccgaccacagccggagcctctccagggcctcctcgtaacaagaagaatcgggagctccgtcctcagagaccaaaaaatgcttacatcttaaagaagtctcggatctctaagaagcctcaggtcccgaagaaaccccgagaatggaagaacccggagtcccagcgcggcttgtccggggtgagcgtgggacctgatgggtggcgaggcaggccgcctcgttccttgagagtgagagggttggggtcaatccaaggctgtctgctaattgcgtcctcctttcccctaggcccaagatccattcccaggccccgcccccgtccctgtggaagtggtccagaagttctgtcgcattgacaaatcccgaaaggtgaggtccagccggagagttgggaagtgctggaggcagggagtgtctgggtgagttggatggaggctgggacaggtagctctcctgtgaccccacttatcctgtggttcttctgccactcctccccaccaacaatgttacagctaccacattctaaagccaaaactcgaagccgacttgaggtggctgaagctgaggaagaggaaacaagtatcaaagctgctcgttctgagctgctgcttgctgaagaacctgggtgagtgagccctaatctggacccccattccctgccttatgggactgtcttttctcgtttttatgttggtatacttgcttcatattgggaagctttactgccatcctaacccttgctttcaggtttctggaaggggaggatggggaagacacagcaaagatatgccaggctgacattgtggaggctgtggacattgcaagtgcagccaaggtgagcctgaggaggtaaaggagccaagggattgattggtggtgcaggacaatagaggaatgggggctagaagaaggcgttactgcagggcactcttttttttcactcttctctttcccagcactttgacttgaatctgcggcagtttggaccctacagactaaactactctcgaactggaaggtaaggttgaattctagtgactcttgaactaagatgtgtttccttaaccacttcagccattcccagtgtatgtttgggttgctgatgaggggagggtccttcgatttgcttgggtgtgagggtaagcacctacagcaacatgtgtctgcccgcctggagagatggggctggcgtggggcagacctcaagttgtctgagtcggtggtcccctgccttaacaccctgcctgcccctcacctccaacagacacctggcttttggagggcgccgaggtcatgtggctgcccttgattgggtaacaaagaagcttatgtgcgagatcaacgtcatggaggcggtgcgggacatccggtcagtggcctcactgtcagcagtcagttggggtgagatagtccattcctgattgaatgatagcctgtgacctcatttcccaattgaaccactcttcctctcccccaggtttctccattctgaggcactgcttgctgttgctcagaaccgctggctccacatctatgacaatcagggcattgagctccactgtatccgccgctgtgaccgagtaacacggcttgagttcctgcccttccacttcctcctggctacagctgtgagtggccatggagctcaggaactgggtggaagcccttgggatgaccacctctcctttaggaccccagcagagggaatacagagggcaatcaggactgggtcattctctctgtctttctctctcagtcagaaacagggtttctaacctacctggatgtgtcagtggggaagattgtggcagctctgaatgctcgagctgggcggctcgatgttatgagtcagaacccttacaatgccgtcatccatctcggacacagcaatggtcagtacctggcttagttttgactctgaccatcctgacttgcttttcttctatatttgtacttcatgagtcccttaaagttacccttttatttcccttttttgttatctcttggtcttgagttcccatctttcccatgtttagtaacctcaggcttaggtgtgtattagcaactttggttcttcttctcttccaggtactgcgtctttatggagtccagctatgaaggagccactggcaaagattctctgtcatcgtggtggggtccgggctgtggcagtagattctacaggcacgtaagtcactggtggcggtgaggtgttaggagtcataggtgggcagaaaggtgtggaaggcagtgtgctttaggagcacagagtctaaagccaggatgcccaggtttaaatcgcagtgttaccacggatgggccttgcaagtataggcatatttcataacctctgtgtgccacagtttcctgaccccgaaaatggaaatatgagtgtccatttcaagggtccacaaactttttctgtaaagagtcagatagtaaatattttatgatttgctgataagaggtaaaatcaaagggtaccatgtaggcatttaaataccaagagaaaacaaattatcacaacttttttttttgagatggagtctcgctctgacacccaggctggagtgcaatggcgcaatctcagctcactgcaacctccacctctcaggttcaagtgattctcctgccttggcctctcgagtatctgggactacaggcgcctgctacaacacctggctaatttttgtatttttagtagagacagggtttcagcatgttgttcaggctggtctcgaattcctgacctcaagtgatctgcccgcctcagcctcccaaagtgctgggattataggcgtgagccactgcgcctgacctttttttttttaaatcttttgagagagacgtagtcttgctctgtctcccaggttggagtgcagtggcgtgatctcggctcactgcaacctccgcctcccagattcaagcgattctcctgcctcagtctcccaagtagctgggattacaggcacctgccatcatgcccagctaattttgtatttttttgtagagacggggttttactgtgttggccaggctggtcttgaactcctgacctcagatgatctgcccgcctcggcctcccaaagtgttgggattacaggcgtgagccactgcgcctggcccacacatttttaggttataaaattaaacgtaatatggccaggtgcggtggctcacgcctgtaatcccagcactttggaggccaaggcgggtggatcgcctgaggtcaggagtttgagaccagcctggccaacatggcgaaactctgtctctactaaaaattcacaaaattagccgggtgtcgtggcgggggcctgtaattccggcaacttgggaggctgaggcaggagaattgcttgaacctgggaggcaggggttgcagtgagccaagactgtgccattgcactccaacctgggcaacaagagcaaaactccgtctcaaaaacaaacaaacaaacaaaacataatatgagactggacacagtggctcatgcctgtaatcttaacagtttggtaggctgaggtgggcagatcacttgagcccagaagttcgaaacaagccatgtcacccatgacatggcaaaactctgtctctacagaagatagaaaaattagccgggtgtggtggtgcatgcctgtagtcccagctactcaggaggctgaggtgatcctcccacctcagcccaggaggttaaggctgcagtgagctgtgatcatgccactgcactctagcatgggcaacagagtgagacccggtctcagaaaaaaaaaataataataatcaaatatgatatttgtgtaatacagatctactaatgggaagaactgaatttctctttttgaggttaacattttgcctaattgatgtacaaagttagtgttccagatggtcaaatttgactgtagatattcatgttcatgctgatctgtagagattgcaagtatttcatctttgaaaacatcttttcacacaggtaatgataggtgatatgtgaggtgcttgaaatgctgtgaagcacttacgactgtgtcactgtgacttgtagtgtacaaagcagcagtgcaaatcaggatgctgtagtcgctgtcgtgaccactcggctgtgtgttgtagagcaaaagcagccacagtattaagtaaatagtgtggccccgttccaataaaactttatttgttggatattggaatttgaatttcatacggttttcacagtctcaaaatattcttttgattttttttcaaccacttaaaaatgtaaaaaccattcttggcttgtgggctatacagaactagatgatgggccaggtttggcccatgggcagtagtttaccaagccttggtttaaagccctcatataagctgttgtagacattaagatgagttaaggcatatagtttagcacagcgcttagcaaaatagggagtgctgtgttcatcattgtcattcaagatgatcgttctctccaggtctggctgatgtgaggggtggaggtggtgtctgctttggatttctgctgttcctgagggagtatctgcattttccacagcttttctgtctgatttgtattttcctctgattccttttgtcatcaggtattcactgggcacctgctgtgggcagggctctgcgctgaggttctggagataaaaggatgaatcgttgagcctgccctggtgtggtgctcccgttatcctttaggtataaaaacttgtggctattttttttttttttttgagacagagtcttgatctgtcacccaggctggagtgcagtggcacaatctcagctcaccacaacctctgccccccggggttcaagcgattctcctgcctcagcctcctgagtagctgggattacaggcgcccacgaaccacgcccagttaattttttaatgtttagtagagatggggtttcaccatcttggccaggctggtcttgaactcctgacatcgtgatccacctgcttcggcctcccaaagtgcaagtgttgggattacaggcgtgagccactgcacccggccatggctatggtttttgagaatgattggccaggtgatgcatttatttattttattactatttttcgagacggagtcttgatctatcacccaggctggagtgcagtggcgcgatctcggttcattacaacctccgcctcctaggctcaagtgattgttctgcctcagcctccaagtagctgggagtacaagtgcatgccactgcatgcgctaatttttgtatttttagtagagatggggttttgccatgttggcttggctggtctcaaactcctgacctcaggtgatccgcccacctcggcctcccaaagtgctgggattacaggcatgagccaccacgcctagctcaggtgatgccattagtttctacacagttatcctctgtcatcccagactcaatgtgtccatcactggataggtcaccgcctcctaaagtttctcttgacctgctctcatctcccagaattttcctgtcacccagaatttgactcaggtacacaccaccacacctggataatttttctattttttgtagagatggggtttcaccatgtagcccaggctggtctctgtcttgaactcctgggctcaagcggtcctcctacctcaacctcccaaagtactgggattacagagtaattactgtgagccaccacatccagcttggccaccagcttattcaaagtctccaggatgctgggaccaccccccccaccacccgctccctgtttttgcataattgtatcttttttttttgagacggagtctcactctgtcacccaggctggagtgcaatggtgtggtctcggctcactgcaacctccacctcctgggttcaagcgattctcctgcctcagcctcctgagaagctgggactacaggtgtgtgccaccacacccggctaatttttgtatttgtagtacagatggaatttcaccatgttggccaggctggtcttgaactcctgaccttgtgatccacccgcctgtcctcccaaagtgctgggattataggcgtgagccaccgtgtctggcctttgtaattgtatctttgtgaatgagtgatttggttctgccctttttactccatatttataccagcctggctctaggagagtcagaaggcctgcccaagggtttctgccctctctgggccactgggccaaagctgtagcttgccctccgtgggctacctgggtcagccactcctgtgcttagggcttaatcactagttcgctgaggcctgaagtttaatcaacaccttgatgctaaacagctctggtccttgtgatcttcagcccatccctgcttttctctggtcctcctcaggagcttgtcaggccacgggggctccagtgatgaggctgaccatctttcttaagaggtgttctggtagcttgtattatgattggattgcgttgacttctcaaagccgaactgctgcttactagtagtacagtagactcccatttggcactgggctggtctttacccaggggtcccatagatgggtgtgtggaggggagaagagccagcatgcatccttgagttgttagttcaccaaaggatgtgaccctgtgttccacgagcgctcggtaattcctggtttgcactgatggcctttctctttggtaaagtcagggcgctgattatcttgtcggaagtatccagctggtcctctcttgggctccatcactgtgcaagtctctgctcataagaactcttcagttcccttctcctgggttcacagccaaggcaaaaaagagactccttggcctcttggcaaacatacatcccctacctggctggtcccccttcagcttccctctctaaggaacaacttgaacatagaaactccaacctcacctgtaatcccagcactctgggaggccaaggtgggcaggtcatttgaggccaggagttcaagaccagcgtggtcaacatggcgaaaccctggctctactaaaaattagcggtggtggcgcatgcctgtaatcccagctacttgggaggctgaggcacgagaatcacttgaaccagggaggcagaggctgcagtgagccagggtcatgccactgcactccagcttgggcaacagagagaccctgtctcaaaaaaagaaaaggaactccaacttctgaaagtaaacaacttatgcagtacatgattcctggagaggatttggtcaccaaccttccctccttccttccagggaaagcacacagaggggcagggcaagggcctccagtgcattacttcaccacttccctgagtaggtcttctcaagtccttggagccttcactttgtgatttgtcactgccagagagcaatgttgggatcatgagctgtgggtcctcagtctgactttaaagaaacctcacaaattgtctgctcctgattttcctgaccatgtttcccaccaatcctaacaaacctctgcttccctctcagtctcaacactctggtgttaatgcatttgaacctgctgtgtatctacttcctgtaattttttgagaattatctagaatggctcaaatcccacctttcccatgaagcctttctgaccactgcacatgctccttccccttgctgggctgtgtgctgcatgtgtgtacagggggacatcacatttgggtgcagcctgtcgtgtgggcgttccttttgacgcccgtgtcttgagagggctgtgtggtgttagcaggttagaggcagatgctaaagagacaggcctgaccattcactgacctagctttcctttccctgagcttcagtttcctcacctcttaaagggaaataaaaatagtatgagttgtgtgcagcttaactgagaggatgcctgtggagtgttcagggtgatggcagtggttattactattaatctttttctccccagccagacttgatgcctggacttggccacagcttgcttggtaaacccatttactgacatattaattgatccctcttctctcaccaggtacatggccacctctggcctagaccaccagctgaagatctttgacttgcgagggacgtaccagcctctgagcactcggaccctgccccatggagcagggcacctggccttctcccagaggggactgctggtggcgggaatgggtgacgttgtcaacatctgggcagggcagggcaaggccagcccaccctcccttgaacagccctacctcacccaccggctctcaggccctgtgcatggccttcagttctgcccctttgaagatgtgctgggggtggggcacactgggggcatcaccagcatgctggtccctggtgagtgggccaggggatggggcttgaagtgaatgaactctgggtggaagtttgggccagagacatccaggaactgggggcttagttgggctggagctgttggactgaggttcttccttatggctccatgcttctccctccctcccttcaggggccggtgagcccaacttcgatggcctggagagtaatccatacagaagccggaagcagcgccaggagtgggaggtgaaggccctgctagagaaggtgaggctcccctgctggagagggtgagattccccccattgctggagagggtcaggttcccccgtcctggagagggtgaggttcctccttcctggagaaggtcaggttcccccctgctggagaaggtcaggttccccactgctggagaaggtcaggttcccccctgctggagaaggtaaggtttcctcttcctggagagggtgagattcccctctcctggacggggtcaggtttccctctgctggagagggtgagattccccctgctggagagggtcaggtttccctctgctggagagggtgaaattccctctcctggagagggtcaggttcccccctgctggagagggtgagattgcccctgttggaggtgaggttcccctgctgcagagagtgaggcccctgctgctggggaaggtgtggtttggggttggaggtagagaaagctctcctgatgtctcatgctgggggtcttgggtagaggggttcagcagcctccctggcttctctttttggtgctaccctcctgtggctccttgctgagtcctgtccctctgtgacacccccaggtacctgcagagcttatttgtctggacccacgagccctggccgaggtggatgtcatctccctggagcagggaaagaaggagcagatagagaggctggtatggagcaggcccctgaatgcccaggcccgtcttctcccccacatcctctccccaccatggcttgtccccagaagtgcggccagcaggtgggtgctgccagttccctgactccgaggctgtaacagatatcactcctgtcccctccctcagggctatgacccgcaggctaaggctcccttccagccaaagccaaagcagaagggccgcagctccacggcaagcctggtgaagaggaagaggaaggtcatggatgaggaacacagggtaaatgagcattggcatgggccgggccttccacaggctgcaccctcctgcttgtgcctctgcccttgtcagcctgccacttctcactctgtgcctgtgtcctccccgtctccggtccccaggacaaggtccggcagagccttcagcagcagcatcataaggaggcgaaggccaagcccacgggggcccggccatctgccctggacagatttgtgcgctgagccagactccagggttgcctgggaacagtctctccccaagatcacctgtagggaaatgagtgttccctggaacaaggaggtgggggcagtgtggccccttccccaactgggggtggacagctgtctcctggggtgggttggtattaaagaggaaagcgattttttggataa

SEQ ID NO: 336 - DNA, 1872 bp, Homo sapiens
ggagttttcaagccgactgtgtggcagctgagaggagttttgcacgtggatcgccgttcgggtgggcgagatggagacagcccccaagccgggcaaggatgtcccgcccaagaaagacaaacttcagaccaagagaaaggtagaggcctccctgggtgggaaacgaagtttttagctgtggggtcggggggcggggcgtgagtgcggagttcctgatgtgcctgtagaaaccgcggcgatactgggaggaagagaccgttccgaccacagccggagcctctccagggcctcctcgtaacaagaagaatcgggagctccgtcctcagagaccaaaaaatgcttacatcttaaagaagtctcggatctctaagaagcctcaggtcccgaagaaaccccgagaatggaagaacccggagtcccagcgcggcttgtccggggtgagcgtgggacctgatgggtggcgaggcaggccgcctcgttccttgagagtgagagggttggggtcaatccaaggctgtctgctaattgcgtcctcctttcccctaggcccaagatccattcccaggccccgcccccgtccctgtggaagtggtccagaagttctgtcgcattgacaaatcccgaaaggtgaggtccagccggagagttgggaagtgctggaggcagggagtgtctgggtgagttggatggaggctgggacaggtagctctcctgtgaccccacttatcctgtggttcttctgccactcctccccaccaacaatgttacagctaccacattctaaagccaaaactcgaagccgacttgaggtggctgaagctgaggaagaggaaacaagtatcaaagctgctcgttctgagctgctgcttgctgaagaacctgggtgagtgagccctaatctggacccccattccctgccttttgggactgtcttttctcgtttttatgttggtatacttgcttcatattgggaagctttactgccatcctaacccttgctttcaggtttctggaaggggaggatggggaagacacagcaaagatatgccaggctgacattgtggaggctgtggacattgcaagtgcagccaaggtgagcctgaggaggtaaaggagccaagggattgattggtggtgcaggacaatagaggaatgggggctagaagaaggcgttactgcagggcactcttttttttcactcttctctttcccagcactttgacttgaatctgcggcagtttggaccctacagactaaactactctcgaactggaaggtaaggttgaattctagtgactcttgaactaagatgtgtttccttaaccacttcagccattcccagtgtatgtttgggttgctgatgaggggagggtccttcgatttgcttgggtgtgagggtaagcacctacagcaacatgtgtctgcccgcctggagagatggggctggcgtggggcagacctcaagttgtctgagtcggtggtcccctgccttaacaccctgcctgcccctcacctccaacagacacctggcttttggagggcgccgaggtcatgtggctgcccttgattgggtaacaaagaagcttatgtgcgagatcaacgtcatggaggcggtgcgggacatccggtcagtggcctcactgtcagcggtcagttggggtgagatagtccattcctgattgaatgatagcctgtgacctcatttcccaattgaaccactcttcctctcccccaggtttctccattctgaggcactgcttgctgttgctcagaaccgctggctccacatctatgacaatcagggcattgagctccactgtatccgccgctgtgaccgagtaacacggcttgagttcctgcccttccacttcc

SEQ ID NO: 337 - DNA, 148 bp, Homo sapiens; identical to SEQ ID NO: 272
  SITE (136): n equals a,t,g, or c

SEQ ID NO: 338 - DNA, 158 bp, Homo sapiens; identical to SEQ ID NO: 268

SEQ ID NO: 339 - DNA, 80 bp, Homo sapiens; identical to SEQ ID NO: 267

SEQ ID NO: 340 - DNA, 126 bp, Homo sapiens; identical to SEQ ID NO: 269
  SITE (9): n equals a,t,g, or c
  SITE (17): n equals a,t,g, or c
  SITE (19): n equals a,t,g, or c
  SITE (20): n equals a,t,g, or c
  SITE (32): n equals a,t,g, or c
  SITE (107): n equals a,t,g, or c
  SITE (113): n equals a,t,g, or c
  SITE (117): n equals a,t,g, or c
  SITE (118): n equals a,t,g, or c

SEQ ID NO: 341 - DNA, 151 bp, Homo sapiens; identical to SEQ ID NO: 277

SEQ ID NO: 342 - DNA, 125 bp, Homo sapiens; identical to SEQ ID NO: 300
  SITE (9): n equals a,t,g, or c
  SITE (10): n equals a,t,g, or c
  SITE (35): n equals a,t,g, or c
  SITE (36): n equals a,t,g, or c
  SITE (65): n equals a,t,g, or c
  SITE (77): n equals a,t,g, or c
  SITE (93): n equals a,t,g, or c

SEQ ID NO: 343 - DNA, 130 bp, Homo sapiens; identical to SEQ ID NO: 279

SEQ ID NO: 344 - DNA, 165 bp, Homo sapiens
ttttatttttttttttttttttttttttttttttttttttttttttttttttttttttttttttttttttttttttttttttttttttttttttttttttttttttttttttttttttttttttttttttttttttttttttttttttgttaaaccaaccccccc

SEQ ID NO: 345 - DNA, 4167 bp, Homo sapiens
  SITE (268): n equals a,t,g, or c
  SITE (269): n equals a,t,g, or c
  SITE (270): n equals a,t,g, or c
  SITE (271): n equals a,t,g, or c
  SITE (272): n equals a,t,g, or c
  SITE (273): n equals a,t,g, or c
  SITE (274): n equals a,t,g, or c
  SITE (275): n equals a,t,g, or c
  SITE (276): n equals a,t,g, or c
  SITE (277): n equals a,t,g, or c
  SITE (278): n equals a,t,g, or c
  SITE (279): n equals a,t,g, or c
  SITE (280): n equals a,t,g, or c
  SITE (281): n equals a,t,g, or c
  SITE (282): n equals a,t,g, or c
  SITE (283): n equals a,t,g, or c
  SITE (284): n equals a,t,g, or c
  SITE (285): n equals a,t,g, or c
  SITE (286): n equals a,t,g, or c
  SITE (287): n equals a,t,g, or c
  SITE (288): n equals a,t,g, or c
  SITE (289): n equals a,t,g, or c
  SITE (290): n equals a,t,g, or c
  SITE (291): n equals a,t,g, or c
  SITE (292): n equals a,t,g, or c
  SITE (293): n equals a,t,g, or c
  SITE (294): n equals a,t,g, or c
  SITE (295): n equals a,t,g, or c
  SITE (296): n equals a,t,g, or c
  SITE (297): n equals a,t,g, or c
  SITE (298): n equals a,t,g, or c
  SITE (299): n equals a,t,g, or c
  SITE (300): n equals a,t,g, or c
  SITE (301): n equals a,t,g, or c
  SITE (302): n equals a,t,g, or c
  SITE (303): n equals a,t,g, or c
  SITE (304): n equals a,t,g, or c
  SITE (305): n equals a,t,g, or c
  SITE (306): n equals a,t,g, or c
  SITE (307): n equals a,t,g, or c
  SITE (308): n equals a,t,g, or c
  SITE (309): n equals a,t,g, or c
  SITE (310): n equals a,t,g, or c
  SITE (311): n equals a,t,g, or c
  SITE (312): n equals a,t,g, or c
  SITE (313): n equals a,t,g, or c
  SITE (314): n equals a,t,g, or c
  SITE (315): n equals a,t,g, or c
  SITE (316): n equals a,t,g, or c
  SITE (317): n equals a,t,g, or c
  SITE (318): n equals a,t,g, or c
  SITE (319): n equals a,t,g, or c
  SITE (320): n equals a,t,g, or c
  SITE (321): n equals a,t,g, or c
  SITE (322): n equals a,t,g, or c
  SITE (323): n equals a,t,g, or c
  SITE (324): n equals a,t,g, or c
  SITE (325): n equals a,t,g, or c
  SITE (326): n equals a,t,g, or c
  SITE (327): n equals a,t,g, or c
  SITE (328): n equals a,t,g, or c
  SITE (329): n equals a,t,g, or c
  SITE (330): n equals a,t,g, or c
  SITE (331): n equals a,t,g, or c
  SITE (332): n equals a,t,g, or c
  SITE (333): n equals a,t,g, or c
  SITE (334): n equals a,t,g, or c
  SITE (335): n equals a,t,g, or c
  SITE (336): n equals a,t,g, or c
  SITE (337): n equals a,t,g, or c
  SITE (338): n equals a,t,g, or c
  SITE (339): n equals a,t,g, or c
  SITE (340): n equals a,t,g, or c
  SITE (341): n equals a,t,g, or c
  SITE (342): n equals a,t,g, or c
  SITE (343): n equals a,t,g, or c
  SITE (344): n equals a,t,g, or c
  SITE (345): n equals a,t,g, or c
  SITE (346): n equals a,t,g, or c
  SITE (347): n equals a,t,g, or c
  SITE (348): n equals a,t,g, or c
  SITE (349): n equals a,t,g, or c
  SITE (350): n equals a,t,g, or c
  SITE (351): n equals a,t,g, or c
  SITE (352): n equals a,t,g, or c
  SITE (353): n equals a,t,g, or c
  SITE (354): n equals a,t,g, or c
  SITE (355): n equals a,t,g, or c
  SITE (356): n equals a,t,g, or c
  SITE (357): n equals a,t,g, or c
  SITE (358): n equals a,t,g, or c
  SITE (359): n equals a,t,g, or c
  SITE (360): n equals a,t,g, or c
  SITE (361): n equals a,t,g, or c
  SITE (362): n equals a,t,g, or c
  SITE (363): n equals a,t,g, or c
  SITE (364): n equals a,t,g, or c
  SITE (365): n equals a,t,g, or c
  SITE (366): n equals a,t,g, or c
  SITE (367): n equals a,t,g, or c
  SITE (368): n equals a,t,g, or c
  SITE (369): n equals a,t,g, or c
  SITE (370): n equals a,t,g, or c
  SITE (371): n equals a,t,g, or c
  SITE (372): n equals a,t,g, or c
  SITE (373): n equals a,t,g, or c
  SITE (374): n equals a,t,g, or c
  SITE (375): n equals a,t,g, or c
  SITE (376): n equals a,t,g, or c
  SITE (377): n equals a,t,g, or c
  SITE (378): n equals a,t,g, or c
  SITE (379): n equals a,t,g, or c
  SITE (380): n equals a,t,g, or c
  SITE (381): n equals a,t,g, or c
  SITE (382): n equals a,t,g, or c
  SITE (383): n equals a,t,g, or c
  SITE (384): n equals a,t,g, or c
  SITE (385): n equals a,t,g, or c
  SITE (386): n equals a,t,g, or c
  SITE (387): n equals a,t,g, or c
  SITE (388): n equals a,t,g, or c
  SITE (389): n equals a,t,g, or c
  SITE (390): n equals a,t,g, or c
  SITE (391): n equals a,t,g, or c
  SITE (392): n equals a,t,g, or c
  SITE (393): n equals a,t,g, or c
  SITE (394): n equals a,t,g, or c
  SITE (395): n equals a,t,g, or c
  SITE (396): n equals a,t,g, or c
  SITE (397): n equals a,t,g, or c
  SITE (398): n equals a,t,g, or c
  SITE (399): n equals a,t,g, or c
  SITE (400): n equals a,t,g, or c
  SITE (401): n equals a,t,g, or c
  SITE (402): n equals a,t,g, or c
  SITE (403): n equals a,t,g, or c
  SITE (404): n equals a,t,g, or c
  SITE (405): n equals a,t,g, or c
  SITE (406): n equals a,t,g, or c
  SITE (407): n equals a,t,g, or c
  SITE (408): n equals a,t,g, or c
  SITE (409): n equals a,t,g, or c
  SITE (410): n equals a,t,g, or c
  SITE (411): n equals a,t,g, or c
  SITE (412): n equals a,t,g, or c
  SITE (413): n equals a,t,g, or c
  SITE (414): n equals a,t,g, or c
  SITE (415): n equals a,t,g, or c
  SITE (416): n equals a,t,g, or c
  SITE (417): n equals a,t,g, or c
  SITE (418): n equals a,t,g, or c
  SITE (419): n equals a,t,g, or c
  SITE (420): n equals a,t,g, or c
  SITE (421): n equals a,t,g, or c
  SITE (422): n equals a,t,g, or c
  SITE (423): n equals a,t,g, or c
  SITE (424): n equals a,t,g, or c
  SITE (425): n equals a,t,g, or c
  SITE (426): n equals a,t,g, or c
  SITE (427): n equals a,t,g, or c
  SITE (428): n equals a,t,g, or c
  SITE (429): n equals a,t,g, or c
  SITE (430): n equals a,t,g, or c
  SITE (431): n equals a,t,g, or c
  SITE (432): n equals a,t,g, or c
  SITE (433): n equals a,t,g, or c
  SITE (434): n equals a,t,g, or c
  SITE (435): n equals a,t,g, or c
  SITE (436): n equals a,t,g, or c
  SITE (437): n equals a,t,g, or c
  SITE (438): n equals a,t,g, or c
  SITE (439): n equals a,t,g, or c
  SITE (440): n equals a,t,g, or c
  SITE (441): n equals a,t,g, or c
  SITE (442): n equals a,t,g, or c
  SITE (443): n equals a,t,g, or c
  SITE (444): n equals a,t,g, or c
  SITE (445): n equals a,t,g, or c
  SITE (446): n equals a,t,g, or c
  SITE (447): n equals a,t,g, or c
  SITE (448): n equals a,t,g, or c
  SITE (449): n equals a,t,g, or c
  SITE (450): n equals a,t,g, or c
  SITE (451): n equals a,t,g, or c
  SITE (452): n equals a,t,g, or c
  SITE (453): n equals a,t,g, or c
  SITE (454): n equals a,t,g, or c
  SITE (455): n equals a,t,g, or c
  SITE (456): n equals a,t,g, or c
  SITE (457): n equals a,t,g, or c
  SITE (458): n equals a,t,g, or c
  SITE (459): n equals a,t,g, or c
  SITE (460): n equals a,t,g, or c
  SITE (461): n equals a,t,g, or c
  SITE (462): n equals a,t,g, or c
  SITE (463): n equals a,t,g, or c
  SITE (464): n equals a,t,g, or c
  SITE (465): n equals a,t,g, or c
  SITE (466): n equals a,t,g, or c
  SITE (467): n equals a,t,g, or c
  SITE (468): n equals a,t,g, or c
  SITE (469): n equals a,t,g, or c
  SITE (470): n equals a,t,g, or c
  SITE (471): n equals a,t,g, or c
  SITE (472): n equals a,t,g, or c
  SITE (473): n equals a,t,g, or c
  SITE (474): n equals a,t,g, or c
  SITE (475): n equals a,t,g, or c
  SITE (476): n equals a,t,g, or c
  SITE (477): n equals a,t,g, or c
  SITE (478): n equals a,t,g, or c
  SITE (479): n equals a,t,g, or c
  SITE (480): n equals a,t,g, or c
  SITE (481): n equals a,t,g, or c
  SITE (482): n equals a,t,g, or c
  SITE (483): n equals a,t,g, or c
  SITE (484): n equals a,t,g, or c
  SITE (485): n equals a,t,g, or c
  SITE (486): n equals a,t,g, or c
  SITE (487): n equals a,t,g, or c
  SITE (488): n equals a,t,g, or c
  SITE (489): n equals a,t,g, or c
  SITE (490): n equals a,t,g, or c
  SITE (491): n equals a,t,g, or c
  SITE (492): n equals a,t,g, or c
  SITE (493): n equals a,t,g, or c
  SITE (494): n equals a,t,g, or c
  SITE (495): n equals a,t,g, or c
  SITE (496): n equals a,t,g, or c
  SITE (497): n equals a,t,g, or c
  SITE (498): n equals a,t,g, or c
  SITE (499): n equals a,t,g, or c
  SITE (500): n equals a,t,g, or c
  SITE (501): n equals a,t,g, or c
  SITE (502): n equals a,t,g, or c
  SITE (503): n equals a,t,g, or c
  SITE (504): n equals a,t,g, or c
  SITE (505): n equals a,t,g, or c
  SITE (506): n equals a,t,g, or c
  SITE (507): n equals a,t,g, or c
  SITE (508): n equals a,t,g, or c
  SITE (509): n equals a,t,g, or c
  SITE (510): n equals a,t,g, or c
  SITE (511): n equals a,t,g, or c
  SITE (512): n equals a,t,g, or c
  SITE (513): n equals a,t,g, or c
  SITE (514): n equals a,t,g, or c
  SITE (515): n equals a,t,g, or c
  SITE (516): n equals a,t,g, or c
  SITE (517): n equals a,t,g, or c
  SITE (518): n equals a,t,g, or c
  SITE (519): n equals a,t,g, or c
  SITE (520): n equals a,t,g, or c
  SITE (521): n equals a,t,g, or c
  SITE (522): n equals a,t,g, or c
  SITE (523): n equals a,t,g, or c
  SITE (524): n equals a,t,g, or c
  SITE (525): n equals a,t,g, or c
  SITE (526): n equals a,t,g, or c
  SITE (527): n equals a,t,g, or c
  SITE (528): n equals a,t,g, or c
  SITE (529): n equals a,t,g, or c
  SITE (530): n equals a,t,g, or c
  SITE (531): n equals a,t,g, or c
  SITE (532): n equals a,t,g, or c
  SITE (533): n equals a,t,g, or c
  SITE (534): n equals a,t,g, or c
  SITE (535): n equals a,t,g, or c
  SITE (536): n equals a,t,g, or c
  SITE (537): n equals a,t,g, or c
  SITE (538): n equals a,t,g, or c
  SITE (539): n equals a,t,g, or c
  SITE (540): n equals a,t,g, or c
  SITE (541): n equals a,t,g, or c
  SITE (542): n equals a,t,g, or c
  SITE (543): n equals a,t,g, or c
  SITE (544): n equals a,t,g, or c
  SITE (545): n equals a,t,g, or c
  SITE (546): n equals a,t,g, or c
  SITE (547): n equals a,t,g, or c
  SITE (548): n equals a,t,g, or c
  SITE (549): n equals a,t,g, or c
  SITE (550): n equals a,t,g, or c
  SITE (551): n equals a,t,g, or c
  SITE (552): n equals a,t,g, or c
  SITE (553): n equals a,t,g, or c
  SITE (554): n equals a,t,g, or c
  SITE (555): n equals a,t,g, or c
  SITE (556): n equals a,t,g, or c
  SITE (557): n equals a,t,g, or c
  SITE (558): n equals a,t,g, or c
  SITE (559): n equals a,t,g, or c
  SITE (560): n equals a,t,g, or c
  SITE (561): n equals a,t,g, or c
  SITE (562): n equals a,t,g, or c
  SITE (563): n equals a,t,g, or c
  SITE (564): n equals a,t,g, or c
  SITE (565): n equals a,t,g, or c
  SITE (566): n equals a,t,g, or c
  SITE (567): n equals a,t,g, or c
  SITE (568): n equals a,t,g, or c
  SITE (569): n equals a,t,g, or c
  SITE (570): n equals a,t,g, or c
  SITE (571): n equals a,t,g, or c
  SITE (572): n equals a,t,g, or c
  SITE (573): n equals a,t,g, or c
  SITE (574): n equals a,t,g, or c
  SITE (575): n equals a,t,g, or c
  SITE (576): n equals a,t,g, or c
  SITE (577): n equals a,t,g, or c
  SITE (578): n equals a,t,g, or c
  SITE (579): n equals a,t,g, or c
  SITE (580): n equals a,t,g, or c
  SITE (581): n equals a,t,g, or c
  SITE (582): n equals a,t,g, or c
  SITE (583): n equals a,t,g, or c
  SITE (584): n equals a,t,g, or c
  SITE (585): n equals a,t,g, or c
  SITE (586): n equals a,t,g, or c
  SITE (587): n equals a,t,g, or c
  SITE (588): n equals a,t,g, or c
  SITE (589): n equals a,t,g, or c
  SITE (590): n equals a,t,g, or c
  SITE (591): n equals a,t,g, or c
  SITE (592): n equals a,t,g, or c
  SITE (593): n equals a,t,g, or c
  SITE (594): n equals a,t,g, or c
  SITE (595): n equals a,t,g, or c
  SITE (596): n equals a,t,g, or c
  SITE (597): n equals a,t,g, or c
  SITE (598): n equals a,t,g, or c
  SITE (599): n equals a,t,g, or c
  SITE (600): n equals a,t,g, or c
  SITE (601): n equals a,t,g, or c
  SITE (602): n equals a,t,g, or c
  SITE (603): n equals a,t,g, or c
  SITE (604): n equals a,t,g, or c
  SITE (605): n equals a,t,g, or c
  SITE (606): n equals a,t,g, or c
  SITE (607): n equals a,t,g, or c
  SITE (608): n equals a,t,g, or c
  SITE (609): n equals a,t,g, or c
  SITE (610): n equals a,t,g, or c
  SITE (611): n equals a,t,g, or c
  SITE (612): n equals a,t,g, or c
  SITE (613): n equals a,t,g, or c
  SITE (614): n equals a,t,g, or c
  SITE (615): n equals a,t,g, or c
  SITE (616): n equals a,t,g, or c
  SITE (617): n equals a,t,g, or c
  SITE (618): n equals a,t,g, or c
  SITE (619): n equals a,t,g, or c
  SITE (620): n equals a,t,g, or c
  SITE (621): n equals a,t,g, or c
  SITE (622): n equals a,t,g, or c
  SITE (623): n equals a,t,g, or c
  SITE (624): n equals a,t,g, or c
  SITE (625): n equals a,t,g, or c
  SITE (626): n equals a,t,g, or c
  SITE (627): n equals a,t,g, or c
  SITE (628): n equals a,t,g, or c
  SITE (629): n equals a,t,g, or c
  SITE (630): n equals a,t,g, or c
  SITE (631): n equals a,t,g, or c
  SITE (632): n equals a,t,g, or c
  SITE (633): n equals a,t,g, or c
  SITE (634): n equals a,t,g, or c
  SITE (635): n equals a,t,g, or c
  SITE (636): n equals a,t,g, or c
  SITE (637): n equals a,t,g, or c
  SITE (638): n equals a,t,g, or c
  SITE (639): n equals a,t,g, or c
  SITE (640): n equals a,t,g, or c
  SITE (641): n equals a,t,g, or c
  SITE (642): n equals a,t,g, or c
  SITE (643): n equals a,t,g, or c
  SITE (644): n equals a,t,g, or c
  SITE (645): n equals a,t,g, or c
  SITE (646): n equals a,t,g, or c
  SITE (647): n equals a,t,g, or c
  SITE (648): n equals a,t,g, or c
  SITE (649): n equals a,t,g, or c
  SITE (650): n equals a,t,g, or c
  SITE (651): n equals a,t,g, or c
  SITE (652): n equals a,t,g, or c
  SITE (653): n equals a,t,g, or c
  SITE (654): n equals a,t,g, or c
  SITE (655): n equals a,t,g, or c
  SITE (656): n equals a,t,g, or c
  SITE (657): n equals a,t,g, or c
  SITE (658): n equals a,t,g, or c
  SITE (659): n equals a,t,g, or c
  SITE (660): n equals a,t,g, or c
  SITE (661): n equals a,t,g, or c
  SITE (662): n equals a,t,g, or c
  SITE (663): n equals a,t,g, or c
  SITE (664): n equals a,t,g, or c
  SITE (665): n equals a,t,g, or c
  SITE (666): n equals a,t,g, or c
  SITE (667): n equals a,t,g, or c
  SITE (668): n equals a,t,g, or c
  SITE (669): n equals a,t,g, or c
  SITE (670): n equals a,t,g, or c
  SITE (671): n equals a,t,g, or c
  SITE (672): n equals a,t,g, or c
  SITE (673): n equals a,t,g, or c
  SITE (674): n equals a,t,g, or c
  SITE (675): n equals a,t,g, or c
  SITE (676): n equals a,t,g, or c
  SITE (677): n equals a,t,g, or c
  SITE (678): n equals a,t,g, or c
  SITE (679): n equals a,t,g, or c
  SITE (680): n equals a,t,g, or c
  SITE (681): n equals a,t,g, or c
  SITE (682): n equals a,t,g, or c
  SITE (683): n equals a,t,g, or c
  SITE (684): n equals a,t,g, or c
  SITE (685): n equals a,t,g, or c
  SITE (686): n equals a,t,g, or c
  SITE (687): n equals a,t,g, or c
  SITE (688): n equals a,t,g, or c
  SITE (689): n equals a,t,g, or c
  SITE (690): n equals a,t,g, or c
  SITE (691): n equals a,t,g, or c
  SITE (692): n equals a,t,g, or c
  SITE (693): n equals a,t,g, or c
  SITE (694): n equals a,t,g, or c
  SITE (695): n equals a,t,g, or c
  SITE (696): n equals a,t,g, or c
  SITE (697): n equals a,t,g, or c
  SITE (698): n equals a,t,g, or c
  SITE (699): n equals a,t,g, or c
  SITE (700): n equals a,t,g, or c
  SITE (701): n equals a,t,g, or c
  SITE (702): n equals a,t,g, or c
  SITE (703): n equals a,t,g, or c
  SITE (704): n equals a,t,g, or c
  SITE (705): n equals a,t,g, or c
  SITE (706): n equals a,t,g, or c
  SITE (707): n equals a,t,g, or c
  SITE (708): n equals a,t,g, or c
  SITE (709): n equals a,t,g, or c
  SITE (710): n equals a,t,g, or c
  SITE (711): n equals a,t,g, or c
  SITE (712): n equals a,t,g, or c
  SITE (713): n equals a,t,g, or c
  SITE (714): n equals a,t,g, or c
  SITE (715): n equals a,t,g, or c
  SITE (716): n equals a,t,g, or c
  SITE (717): n equals a,t,g, or c
  SITE (718): n equals a,t,g, or c
  SITE (719): n equals a,t,g, or c
  SITE (720): n equals a,t,g, or c
  SITE (721): n equals a,t,g, or c
  SITE (722): n equals a,t,g, or c
  SITE (723): n equals a,t,g, or c
  SITE (724): n equals a,t,g, or c
  SITE (725): n equals a,t,g, or c
  SITE (726): n equals a,t,g, or c
  SITE (727): n equals a,t,g, or c
  SITE (728): n equals a,t,g, or c
  SITE (729): n equals a,t,g, or c
  SITE (730): n equals a,t,g, or c
  SITE (731): n equals a,t,g, or c
  SITE (732): n equals a,t,g, or c
  SITE (733): n equals a,t,g, or c
  SITE (734): n equals a,t,g, or c
  SITE (735): n equals a,t,g, or c
  SITE (736): n equals a,t,g, or c
  SITE (737): n equals a,t,g, or c
  SITE (738): n equals a,t,g, or c
  SITE (739): n equals a,t,g, or c
  SITE (740): n equals a,t,g, or c
  SITE (741): n equals a,t,g, or c
  SITE (742): n equals a,t,g, or c
  SITE (743): n equals a,t,g, or c
  SITE (744): n equals a,t,g, or c
  SITE (745): n equals a,t,g, or c
  SITE (746): n equals a,t,g, or c
  SITE (747): n equals a,t,g, or c
  SITE (748): n equals a,t,g, or c
  SITE (749): n equals a,t,g, or c
  SITE (750): n equals a,t,g, or c
  SITE (751): n equals a,t,g, or c
  SITE (752): n equals a,t,g, or c
  SITE (753): n equals a,t,g, or c
  SITE (754): n equals a,t,g, or c
  SITE (755): n equals a,t,g, or c
  SITE (756): n equals a,t,g, or c
  SITE (757): n equals a,t,g, or c
  SITE (758): n equals a,t,g, or c
  SITE (759): n equals a,t,g, or c
  SITE (760): n equals a,t,g, or c
  SITE (761): n equals a,t,g, or c
  SITE (762): n equals a,t,g, or c
  SITE (763): n equals a,t,g, or c
  SITE (764): n equals a,t,g, or c
  SITE (765): n equals a,t,g, or c
  SITE (766): n equals a,t,g, or c
  SITE (767): n equals a,t,g, or c
  SITE (768): n equals a,t,g, or c
  SITE (769): n equals a,t,g, or c
  SITE (770): n equals a,t,g, or c
  SITE (771): n equals a,t,g, or c
  SITE (772): n equals a,t,g, or c
  SITE (773): n equals a,t,g, or c
  SITE (774): n equals a,t,g, or c
  SITE (775): n equals a,t,g, or c
  SITE (776): n equals a,t,g, or c
  SITE (777): n equals a,t,g, or c
  SITE (778): n equals a,t,g, or c
  SITE (779): n equals a,t,g, or c
  SITE (780): n equals a,t,g, or c
  SITE (781): n equals a,t,g, or c
  SITE (782): n equals a,t,g, or c
  SITE (783): n equals a,t,g, or c
  SITE (784): n equals a,t,g, or c
  SITE (785): n equals a,t,g, or c
  SITE (786): n equals a,t,g, or c
  SITE (787): n equals a,t,g, or c
  SITE (788): n equals a,t,g, or c
  SITE (789): n equals a,t,g, or c
  SITE (790): n equals a,t,g, or c
  SITE (791): n equals a,t,g, or c
  SITE (792): n equals a,t,g, or c
  SITE (793): n equals a,t,g, or c
  SITE (794): n equals a,t,g, or c
  SITE (795): n equals a,t,g, or c
  SITE (796): n equals a,t,g, or c
  SITE (797): n equals a,t,g, or c
  SITE (798): n equals a,t,g, or c
  SITE (799): n equals a,t,g, or c
  SITE (800): n equals a,t,g, or c
  SITE (801): n equals a,t,g, or c
  SITE (802): n equals a,t,g, or c
  SITE (803): n equals a,t,g, or c
  SITE (804): n equals a,t,g, or c
  SITE (805): n equals a,t,g, or c
  SITE (806): n equals a,t,g, or c
  SITE (807): n equals a,t,g, or c
  SITE (808): n equals a,t,g, or c
  SITE (809): n equals a,t,g, or c
  SITE (810): n equals a,t,g, or c
  SITE (811): n equals a,t,g, or c
  SITE (812): n equals a,t,g, or c
  SITE (813): n equals a,t,g, or c
  SITE (814): n equals a,t,g, or c
  SITE (815): n equals a,t,g, or c
  SITE (816): n equals a,t,g, or c
  SITE (817): n equals a,t,g, or c
  SITE (818): n equals a,t,g, or c
  SITE (819): n equals a,t,g, or c
  SITE (820): n equals a,t,g, or c
  SITE (821): n equals a,t,g, or c
  SITE (822): n equals a,t,g, or c
  SITE (823): n equals a,t,g, or c
  SITE (824): n equals a,t,g, or c
  SITE (825): n equals a,t,g, or c
  SITE (826): n equals a,t,g, or c
  SITE (827): n equals a,t,g, or c
  SITE (828): n equals a,t,g, or c
  SITE (829): n equals a,t,g, or c
  SITE (830): n equals a,t,g, or c
  SITE (831): n equals a,t,g, or c
  SITE (832): n equals a,t,g, or c
  SITE (833): n equals a,t,g, or c
  SITE (834): n equals a,t,g, or c
  SITE (835): n equals a,t,g, or c
  SITE (836): n equals a,t,g, or c
  SITE (837): n equals a,t,g, or c
  SITE (838): n equals a,t,g, or c
  SITE (839): n equals a,t,g, or c
  SITE (840): n equals a,t,g, or c
  SITE (841): n equals a,t,g, or c
  SITE (842): n equals a,t,g, or c
  SITE (843): n equals a,t,g, or c
  SITE (844): n equals a,t,g, or c
  SITE (845): n equals a,t,g, or c
  SITE (846): n equals a,t,g, or c
  SITE (847): n equals a,t,g, or c
  SITE (848): n equals a,t,g, or c
  SITE (849): n equals a,t,g, or c
  SITE (850): n equals a,t,g, or c
  SITE (851): n equals a,t,g, or c
  SITE (852): n equals a,t,g, or c
  SITE (853): n equals a,t,g, or c
  SITE (854): n equals a,t,g, or c
  SITE (855): n equals a,t,g, or c
  SITE (856): n equals a,t,g, or c
  SITE (857): n equals a,t,g, or c
  SITE (858): n equals a,t,g, or c
  SITE (859): n equals a,t,g, or c
  SITE (860): n equals a,t,g, or c
  SITE (861): n equals a,t,g, or c
  SITE (862): n equals a,t,g, or c
  SITE (863): n equals a,t,g, or c
  SITE (864): n equals a,t,g, or c
  SITE (865): n equals a,t,g, or c
  SITE (866): n equals a,t,g, or c
  SITE (867): n equals a,t,g, or c
  SITE (868): n equals a,t,g, or c
  SITE (869): n equals a,t,g, or c
  SITE (870): n equals a,t,g, or c
  SITE (871): n equals a,t,g, or c
  SITE (872): n equals a,t,g, or c
  SITE (873): n equals a,t,g, or c
  SITE (874): n equals a,t,g, or c
  SITE (875): n equals a,t,g, or c
  SITE (876): n equals a,t,g, or c
  SITE (877): n equals a,t,g, or c
  SITE (878): n equals a,t,g, or c
  SITE (879): n equals a,t,g, or c
  SITE (880): n equals a,t,g, or c
  SITE (881): n equals a,t,g, or c
  SITE (882): n equals a,t,g, or c
  SITE (883): n equals a,t,g, or c
  SITE (884): n equals a,t,g, or c
  SITE (885): n equals a,t,g, or c
  SITE (886): n equals a,t,g, or c
  SITE (887): n equals a,t,g, or c
  SITE (888): n equals a,t,g, or c
  SITE (889): n equals a,t,g, or c
  SITE (890): n equals a,t,g, or c
  SITE (891): n equals a,t,g, or c
  SITE (892): n equals a,t,g, or c
  SITE (893): n equals a,t,g, or c
  SITE (894): n equals a,t,g, or c
  SITE (895): n equals a,t,g, or c
  SITE (896): n equals a,t,g, or c
  SITE (897): n equals a,t,g, or c
  SITE (898): n equals a,t,g, or c
  SITE (899): n equals a,t,g, or c
  SITE (900): n equals a,t,g, or c
  SITE (901): n equals a,t,g, or c
  SITE (902): n equals a,t,g, or c
  SITE (903): n equals a,t,g, or c
  SITE (904): n equals a,t,g, or c
  SITE (905): n equals a,t,g, or c
  SITE (906): n equals a,t,g, or c
  SITE (907): n equals a,t,g, or c
  SITE (908): n equals a,t,g, or c
  SITE (909): n equals a,t,g, or c
  SITE (910): n equals a,t,g, or c
  SITE (911): n equals a,t,g, or c
  SITE (912): n equals a,t,g, or c
  SITE (913): n equals a,t,g, or c
  SITE (914): n equals a,t,g, or c
  SITE (915): n equals a,t,g, or c
  SITE (916): n equals a,t,g, or c
  SITE (917): n equals a,t,g, or c
  SITE (918): n equals a,t,g, or c
  SITE (919): n equals a,t,g, or c
  SITE (920): n equals a,t,g, or c
  SITE (921): n equals a,t,g, or c
  SITE (922): n equals a,t,g, or c
  SITE (923): n equals a,t,g, or c
  SITE (924): n equals a,t,g, or c
  SITE (925): n equals a,t,g, or c
  SITE (926): n equals a,t,g, or c
  SITE (927): n equals a,t,g, or c
  SITE (928): n equals a,t,g, or c
  SITE (929): n equals a,t,g, or c
  SITE (930): n equals a,t,g, or c
  SITE (931): n equals a,t,g, or c
  SITE (932): n equals a,t,g, or c
  SITE (933): n equals a,t,g, or c
  SITE (934): n equals a,t,g, or c
  SITE (935): n equals a,t,g, or c
  SITE (936): n equals a,t,g, or c
  SITE (937): n equals a,t,g, or c
  SITE (938): n equals a,t,g, or c
  SITE (939): n equals a,t,g, or c
  SITE (940): n equals a,t,g, or c
  SITE (941): n equals a,t,g, or c
  SITE (942): n equals a,t,g, or c
  SITE (943): n equals a,t,g, or c
  SITE (944): n equals a,t,g, or c
  SITE (945): n equals a,t,g, or c
  SITE (946): n equals a,t,g, or c
  SITE (947): n equals a,t,g, or c
  SITE (948): n equals a,t,g, or c
  SITE (949): n equals a,t,g, or c
  SITE (950): n equals a,t,g, or c
  SITE (951): n equals a,t,g, or c
  SITE (952): n equals a,t,g, or c
  SITE (953): n equals a,t,g, or c
  SITE (954): n equals a,t,g, or c
  SITE (955): n equals a,t,g, or c
  SITE (956): n equals a,t,g, or c
  SITE (957): n equals a,t,g, or c
  SITE (958): n equals a,t,g, or c
  SITE (959): n equals a,t,g, or c
  SITE (960): n equals a,t,g, or c
  SITE (961): n equals a,t,g, or c
  SITE (962): n equals a,t,g, or c
  SITE (963): n equals a,t,g, or c
  SITE (964): n equals a,t,g, or c
  SITE (965): n equals a,t,g, or c
  SITE (966): n equals a,t,g, or c
  SITE (967): n equals a,t,g, or c
  SITE (968): n equals a,t,g, or c
  SITE (969): n equals a,t,g, or c
  SITE (970): n equals a,t,g, or c
  SITE (971): n equals a,t,g, or c
  SITE (972): n equals a,t,g, or c
  SITE (973): n equals a,t,g, or c
  SITE (974): n equals a,t,g, or c
  SITE (975): n equals a,t,g, or c
  SITE (976): n equals a,t,g, or c
  SITE (977): n equals a,t,g, or c
  SITE (978): n equals a,t,g, or c
  SITE (979): n equals a,t,g, or c
  SITE (980): n equals a,t,g, or c
  SITE (981): n equals a,t,g, or c
  SITE (982): n equals a,t,g, or c
  SITE (983): n equals a,t,g, or c
  SITE (984): n equals a,t,g, or c
  SITE (985): n equals a,t,g, or c
  SITE (986): n equals a,t,g, or c
  SITE (987): n equals a,t,g, or c
  SITE (988): n equals a,t,g, or c
  SITE (989): n equals a,t,g, or c
  SITE (990): n equals a,t,g, or c
  SITE (991): n equals a,t,g, or c
  SITE (992): n equals a,t,g, or c
  SITE (993): n equals a,t,g, or c
  SITE (994): n equals a,t,g, or c
  SITE (995): n equals a,t,g, or c
  SITE (996): n equals a,t,g, or c
  SITE (997): n equals a,t,g, or c
  SITE (998): n equals a,t,g, or c
  SITE (999): n equals a,t,g, or c
  SITE (1000): n equals a,t,g, or c
  SITE (1001): n equals a,t,g, or c
  SITE (1002): n equals a,t,g, or c
  SITE (1003): n equals a,t,g, or c
  SITE (1004): n equals a,t,g, or c
  SITE (1005): n equals a,t,g, or c
  SITE (1006): n equals a,t,g, or c
  SITE (1007): n equals a,t,g, or c
  SITE (1008): n equals a,t,g, or c
  SITE (1009): n equals a,t,g, or c
  SITE (1010): n equals a,t,g, or c
  SITE (1011): n equals a,t,g, or c
  SITE (1012): n equals a,t,g, or c
  SITE (1013): n equals a,t,g, or c
  SITE (1014): n equals a,t,g, or c
  SITE (1015): n equals a,t,g, or c
  SITE (1016): n equals a,t,g, or c
  SITE (1017): n equals a,t,g, or c
  SITE (1018): n equals a,t,g, or c
  SITE (1019): n equals a,t,g, or c
  SITE (1020): n equals a,t,g, or c
  SITE (1021): n equals a,t,g, or c
  SITE (1022): n equals a,t,g, or c
  SITE (1023): n equals a,t,g, or c
  SITE (1024): n equals a,t,g, or c
  SITE (1025): n equals a,t,g, or c
  SITE (1026): n equals a,t,g, or c
  SITE (1027): n equals a,t,g, or c
  SITE (1028): n equals a,t,g, or c
  SITE (1029): n equals a,t,g, or c
  SITE (1030): n equals a,t,g, or c
  SITE (1031): n equals a,t,g, or c
  SITE (1032): n equals a,t,g, or c
  SITE (1033): n equals a,t,g, or c
  SITE (1034): n equals a,t,g, or c
  SITE (1035): n equals a,t,g, or c
  SITE (1036): n equals a,t,g, or c
  SITE (1037): n equals a,t,g, or c
  SITE (1038): n equals a,t,g, or c
  SITE (1039): n equals a,t,g, or c
  SITE (1040): n equals a,t,g, or c
  SITE (1041): n equals a,t,g, or c
  SITE (1042): n equals a,t,g, or c
  SITE (1043): n equals a,t,g, or c
  SITE (1044): n equals a,t,g, or c
  SITE (1045): n equals a,t,g, or c
  SITE (1046): n equals a,t,g, or c
  SITE (1047): n equals a,t,g, or c
  SITE (1048): n equals a,t,g, or c
  SITE (1049): n equals a,t,g, or c
  SITE (1050): n equals a,t,g, or c
  SITE (1051): n equals a,t,g, or c
  SITE (1052): n equals a,t,g, or c
  SITE (1053): n equals a,t,g, or c
  SITE (1054): n equals a,t,g, or c
  SITE (1055): n equals a,t,g, or c
  SITE (1056): n equals a,t,g, or c
  SITE (1057): n equals a,t,g, or c
  SITE (1058): n equals a,t,g, or c
  SITE (1059): n equals a,t,g, or c
  SITE (1060): n equals a,t,g, or c
  SITE (1061): n equals a,t,g, or c
  SITE (1062): n equals a,t,g, or c
  SITE (1063): n equals a,t,g, or c
  SITE (1064): n equals a,t,g, or c
  SITE (1065): n equals a,t,g, or c
  SITE (1066): n equals a,t,g, or c
  SITE (1067): n equals a,t,g, or c
  SITE (1068): n equals a,t,g, or c
  SITE (1069): n equals a,t,g, or c
  SITE (1070): n equals a,t,g, or c
  SITE (1071): n equals a,t,g, or c
  SITE (1072): n equals a,t,g, or c
  SITE (1073): n equals a,t,g, or c
  SITE (1074): n equals a,t,g, or c
  SITE (1075): n equals a,t,g, or c
  SITE (1076): n equals a,t,g, or c
  SITE (1077): n equals a,t,g, or c
  SITE (1078): n equals a,t,g, or c
  SITE (1079): n equals a,t,g, or c
  SITE (1080): n equals a,t,g, or c
  SITE (1081): n equals a,t,g, or c
  SITE (1082): n equals a,t,g, or c
  SITE (1083): n equals a,t,g, or c
  SITE (1084): n equals a,t,g, or c
  SITE (1085): n equals a,t,g, or c
  SITE (1086): n equals a,t,g, or c
  SITE (1087): n equals a,t,g, or c
  SITE (1088): n equals a,t,g, or c
  SITE (1089): n equals a,t,g, or c
  SITE (1090): n equals a,t,g, or c
  SITE (1091): n equals a,t,g, or c
  SITE (1092): n equals a,t,g, or c
  SITE (1093): n equals a,t,g, or c
  SITE (1094): n equals a,t,g, or c
  SITE (1095): n equals a,t,g, or c
  SITE (1096): n equals a,t,g, or c
  SITE (1097): n equals a,t,g, or c
  SITE (1098): n equals a,t,g, or c
  SITE (1099): n equals a,t,g, or c
  SITE (1100): n equals a,t,g, or c
  SITE (1101): n equals a,t,g, or c
  SITE (1102): n equals a,t,g, or c
  SITE (1103): n equals a,t,g, or c
  SITE (1104): n equals a,t,g, or c
  SITE (1105): n equals a,t,g, or c
  SITE (1106): n equals a,t,g, or c
  SITE (1107): n equals a,t,g, or c
  SITE (1108): n equals a,t,g, or c
  SITE (1109): n equals a,t,g, or c
  SITE (1110): n equals a,t,g, or c
  SITE (1111): n equals a,t,g, or c
  SITE (1112): n equals a,t,g, or c
  SITE (1113): n equals a,t,g, or c
  SITE (1114): n equals a,t,g, or c
  SITE (1115): n equals a,t,g, or c
  SITE (1116): n equals a,t,g, or c
  SITE (1117): n equals a,t,g, or c
  SITE (1118): n equals a,t,g, or c
  SITE (1119): n equals a,t,g, or c
  SITE (1120): n equals a,t,g, or c
  SITE (1121): n equals a,t,g, or c
  SITE (1122): n equals a,t,g, or c
  SITE (1123): n equals a,t,g, or c
  SITE (1124): n equals a,t,g, or c
  SITE (1125): n equals a,t,g, or c
  SITE (1126): n equals a,t,g, or c
  SITE (1127): n equals a,t,g, or c
  SITE (1128): n equals a,t,g, or c
  SITE (1129): n equals a,t,g, or c
  SITE (1130): n equals a,t,g, or c
  SITE (1131): n equals a,t,g, or c
  SITE (1132): n equals a,t,g, or c
  SITE (1133): n equals a,t,g, or c
  SITE (1134): n equals a,t,g, or c
  SITE (1135): n equals a,t,g, or c
  SITE (1136): n equals a,t,g, or c
  SITE (1137): n equals a,t,g, or c
  SITE (1138): n equals a,t,g, or c
  SITE (1139): n equals a,t,g, or c
  SITE (1140): n equals a,t,g, or c
  SITE (1141): n equals a,t,g, or c
  SITE (1142): n equals a,t,g, or c
  SITE (1143): n equals a,t,g, or c
  SITE (1144): n equals a,t,g, or c
  SITE (1145): n equals a,t,g, or c
  SITE (1146): n equals a,t,g, or c
  SITE (1147): n equals a,t,g, or c
  SITE (1148): n equals a,t,g, or c
  SITE (1149): n equals a,t,g, or c
  SITE (1150): n equals a,t,g, or c
  SITE (1151): n equals a,t,g, or c
  SITE (1152): n equals a,t,g, or c
  SITE (1153): n equals a,t,g, or c
  SITE (1154): n equals a,t,g, or c
  SITE (1155): n equals a,t,g, or c
  SITE (1156): n equals a,t,g, or c
  SITE (1157): n equals a,t,g, or c
  SITE (1158): n equals a,t,g, or c
  SITE (1159): n equals a,t,g, or c
  SITE (1160): n equals a,t,g, or c
  SITE (1161): n equals a,t,g, or c
  SITE (1162): n equals a,t,g, or c
  SITE (1163): n equals a,t,g, or c
  SITE (1164): n equals a,t,g, or c
  SITE (1165): n equals a,t,g, or c
  SITE (1166): n equals a,t,g, or c
  SITE (1167): n equals a,t,g, or c
  SITE (1168): n equals a,t,g, or c
  SITE (1169): n equals a,t,g, or c
  SITE (1170): n equals a,t,g, or c
  SITE (1171): n equals a,t,g, or c
  SITE (1172): n equals a,t,g, or c
  SITE (1173): n equals a,t,g, or c
  SITE (1174): n equals a,t,g, or c
  SITE (1175): n equals a,t,g, or c
  SITE (1176): n equals a,t,g, or c
  SITE (1177): n equals a,t,g, or c
  SITE (1178): n equals a,t,g, or c
  SITE (1179): n equals a,t,g, or c
  SITE (1180): n equals a,t,g, or c
  SITE (1181): n equals a,t,g, or c
  SITE (1182): n equals a,t,g, or c
  SITE (1183): n equals a,t,g, or c
  SITE (1184): n equals a,t,g, or c
  SITE (1185): n equals a,t,g, or c
  SITE (1186): n equals a,t,g, or c
  SITE (1187): n equals a,t,g, or c
  SITE (1188): n equals a,t,g, or c
  SITE (1189): n equals a,t,g, or c
  SITE (1190): n equals a,t,g, or c
  SITE (1191): n equals a,t,g, or c
  SITE (1192): n equals a,t,g, or c
  SITE (1193): n equals a,t,g, or c
  SITE (1194): n equals a,t,g, or c
  SITE (1195): n equals a,t,g, or c
  SITE (1196): n equals a,t,g, or c
  SITE (1197): n equals a,t,g, or c
  SITE (1198): n equals a,t,g, or c
  SITE (1199): n equals a,t,g, or c
  SITE (1200): n equals a,t,g, or c
  SITE (1201): n equals a,t,g, or c
  SITE (1202): n equals a,t,g, or c
  SITE (1203): n equals a,t,g, or c
  SITE (1204): n equals a,t,g, or c
  SITE (1205): n equals a,t,g, or c
  SITE (1206): n equals a,t,g, or c
  SITE (1207): n equals a,t,g, or c
  SITE (1208): n equals a,t,g, or c
  SITE (1209): n equals a,t,g, or c
  SITE (1210): n equals a,t,g, or c
  SITE (1211): n equals a,t,g, or c
  SITE (1212): n equals a,t,g, or c
  SITE (1213): n equals a,t,g, or c
  SITE (1214): n equals a,t,g, or c
  SITE (1215): n equals a,t,g, or c
  SITE (1216): n equals a,t,g, or c
  SITE (1217): n equals a,t,g, or c
  SITE (1218): n equals a,t,g, or c
  SITE (1219): n equals a,t,g, or c
  SITE (1220): n equals a,t,g, or c
  SITE (1221): n equals a,t,g, or c
  SITE (1222): n equals a,t,g, or c
  SITE (1223): n equals a,t,g, or c
  SITE (1224): n equals a,t,g, or c
  SITE (1225): n equals a,t,g, or c
  SITE (1226): n equals a,t,g, or c
  SITE (1227): n equals a,t,g, or c
  SITE (1228): n equals a,t,g, or c
  SITE (1229): n equals a,t,g, or c
  SITE (1230): n equals a,t,g, or c
  SITE (1231): n equals a,t,g, or c
  SITE (1232): n equals a,t,g, or c
  SITE (1233): n equals a,t,g, or c
  SITE (1234): n equals a,t,g, or c
  SITE (1235): n equals a,t,g, or c
  SITE (1236): n equals a,t,g, or c
  SITE (1237): n equals a,t,g, or c
  SITE (1238): n equals a,t,g, or c
  SITE (1239): n equals a,t,g, or c
  SITE (1240): n equals a,t,g, or c
  SITE (1241): n equals a,t,g, or c
  SITE (1242): n equals a,t,g, or c
  SITE (1243): n equals a,t,g, or c
  SITE (1244): n equals a,t,g, or c
  SITE (1245): n equals a,t,g, or c
  SITE (1246): n equals a,t,g, or c
  SITE (1247): n equals a,t,g, or c
  SITE (1248): n equals a,t,g, or c
  SITE (1249): n equals a,t,g, or c
  SITE (1250): n equals a,t,g, or c
  SITE (1251): n equals a,t,g, or c
  SITE (1252): n equals a,t,g, or c
  SITE (1253): n equals a,t,g, or c
  SITE (1254): n equals a,t,g, or c
  SITE (1255): n equals a,t,g, or c
  SITE (1256): n equals a,t,g, or c
  SITE (1257): n equals a,t,g, or c
  SITE (1258): n equals a,t,g, or c
  SITE (1259): n equals a,t,g, or c
  SITE (1260): n equals a,t,g, or c
  SITE (1261): n equals a,t,g, or c
  SITE (1262): n equals a,t,g, or c
  SITE (1263): n equals a,t,g, or c
  SITE (1264): n equals a,t,g, or c
  SITE (1265): n equals a,t,g, or c
  SITE (1266): n equals a,t,g, or c
  SITE (1267): n equals a,t,g, or c
ttttttttttttttttttttcttttctttttttttttttttttttttcttttttttttttttttttttttttttttcttttttttttttctttttttttttttttttttttctcttctttttttttttttttttttttttctttttttttttcttctttctttttctctcttttttttttcttttttcttttttcttttttttttttttttttcttttttttttcttctttttttttttttctttttttttttttttttttttttccnnnnnnnnnnnnnnnnnnnnnnnnnnnnnnnnnnnnnnnnnnnnnnnnnnnnnnnnnnnnnnnnnnnnnnnnnnnnnnnnnnnnnnnnnnnnnnnnnnnnnnnnnnnnnnnnnnnnnnnnnnnnnnnnnnnnnnnnnnnnnnnnnnnnnnnnnnnnnnnnnnnnnnnnnnnnnnnnnnnnnnnnnnnnnnnnnnnnnnnnnnnnnnnnnnnnnnnnnnnnnnnnnnnnnnnnnnnnnnnnnnnnnnnnnnnnnnnnnnnnnnnnnnnnnnnnnnnnnnnnnnnnnnnnnnnnnnnnnnnnnnnnnnnnnnnnnnnnnnnnnnnnnnnnnnnnnnnnnnnnnnnnnnnnnnnnnnnnnnnnnnnnnnnnnnnnnnnnnnnnnnnnnnnnnnnnnnnnnnnnnnnnnnnnnnnnnnnnnnnnnnnnnnnnnnnnnnnnnnnnnnnnnnnnnnnnnnnnnnnnnnnnnnnnnnnnnnnnnnnnnnnnnnnnnnnnnnnnnnnnnnnnnnnnnnnnnnnnnnnnnnnnnnnnnnnnnnnnnnnnnnnnnnnnnnnnnnnnnnnnnnnnnnnnnnnnnnnnnnnnnnnnnnnnnnnnnnnnnnnnnnnnnnnnnnnnnnnnnnnnnnnnnnnnnnnnnnnnnnnnnnnnnnnnnnnnnnnnnnnnnnnnnnnnnnnnnnnnnnnnnnnnnnnnnnnnnnnnnnnnnnnnnnnnnnnnnnnnnnnnnnnnnnnnnnnnnnnnnnnnnnnnnnnnnnnnnnnnnnnnnnnnnnnnnnnnnnnnnnnnnnnnnnnnnnnnnnnnnnnnnnnnnnnnnnnnnnnnnnnnnnnnnnnnnnnnnnnnnnnnnnnnnnnnnnnnnnnnnnnnnnnnnnnnnnnnnnnnnnnnnnnnnnnnnnnnnnnnnnnnnnnnnnnnnnnnnnnnnnnnnnnnnnnnnnnnnnnnnnnnnnnnnnnnnnnnnnnnnnnnnnnnnnnnnnnnnnnnnnnnnnnnnnnnnnnnnnnnnnnntcactacaacctccacctcccagccgcctgccttggcctcccaaagtgccgagattgcagcctctgcccggccgccaccccgtctgggaagtgaggagtgtctctgcctggccgcccatcgtctgggatgtgaggagcccctctgcccggccgcccagtctgggaagtgaggagcgtctccgcccggccgccatcccatctaggaagtgaggagcgcctcttcccagccgccatcacatctaggaagtgaggagcgtctctgcccggccgcccatcgtctgagatgtggggagcgcctctgccccaccgccccatctgggatgtgaggagcgcctctgcccggccgagaccccgtctgggaggtgaggagcgtctctgcccggccgccccgtctgagaagtgaggagaccctctgcctggcaaccaccccgtctgagaagtgaggagcccctccgcccggcagctgccccgtctgagaagtgaggagcctctccgcccagcagccaccccatctgggaagtgaggagcatctccgcccggcagccaccccatccgggagggaggtgagggggggtcagccccccgcccggccagctgccccatccgggagggaggtggggggtcagccccccgcccggccagccgtgccatccgggagggaggtgggggggtcagccccctgcccggccagccgcccggtccgggaggtgaggggcgcctctgcccggccgcccctactgggaagtgaggagcccctctgcccggccagccgccccgtccgggagggaggtgggggggtcagccctccgcccggccagccgccccgtctgggaggtgaggggcgcctctgcccggccgcccctactgggaagtgaggagcccctctgcccggccagccgccccgtccgggagggaggtgggggggtcggccccccgcccggccagccgccccgtccgggagggaggtgggggtgtcggccccccgcccggccagccgccccgtccgggagggaggtggggggggtcagcccccctgcccggccagccgccccgtccgggaggtgaggggcgcctctgcccggccacccctactgggaagtgaggagcccctctgcccggccagccgccccgtccgcgagggaggtgggggggtcagccccccgcccggccagccgccccgtccgggagggaggtggggggggtcagcccccctgcccggccagccgccccgtccgggagggaggtggggggggtcagcccccctgcccggccagccgccccgtccgggaggtgaggggcgcctctgcccggccgcccctactgggaagtgaggagcccctctgcccggccagctgccccgtccgcgagggaggtgggggggtcagccccccgcccggccagccgccccgtccgggagggaggtggggggggtcagcccccctgcccggccagccgccccgtccgggaggtgaggggcgcctctgcccggccgcccctactgggaagtgaggagcccctctgcccggccagccgccccgtccgcgagggaggtgggggggtcagccccccgcccggccagccgccccgtccgggagggaggtggggggggtcagcccccctgcccggccagccgccccgtccgggaggtgaggggcgcctctgcccggccgcccctactgggaagtgaggagcccctctgcctggccagccgccccgtccgggagggaggtggggggtcagccccccgaccggccagccgccccgtccgggagggaggtgggggggtcagccccccgcccggccagccgccccgcccaggaagtgaggggcgcttctgcccggccgcccctactgggaagtgaggagcccctctgcccggccaccaccccgtctgggaggtgtgcccaacagctcattgagaacgggccaggatgacaatggcggctttgtggaatagaaaggcgggaaaggtggggaaaagattgagaaatcggatggttgccgtgtctgtgtagaaagaagtagacatgggagacttttcattttgttctgcactaagaaaaattcctctgccttgggatcctgttgatctgtgaccttacccccaaccctgtgctctctgaaacatgtgctgtgtccactcagggttaaatggattaagggcggtgcaagatgtgctttgttaaacagatgcttgaaggcagcatgctcgttaagagtcatcaccaatccctaatctcaagtaatcagggacacaaacactgcggaaggccgcagggtcctctgcctaggaaaaccagagacctttgttcacttgtttatctgctgaccttccctccactattgtcccatgaccctgccaaatccccctctgtgagaaacacccaagaattatcaataaaaaaataaattaaaaaaaaaaaaaaaaatattccatgctcatggataggaagaatcaatattgttaaaatggccatactgcccaaagcaatctacacattcaacactattcctatcaaactaccaatgtcacttttcacagaattagaaaaaaactaccacaaaattcatatggaaccaaaaaagaacctaaatagccaagataatcctaagcaaaaagaacaacgacagaggtatgacattacctgacttcaaactatgctatcagactacaagaaccaaaagagcatggtacttgtacgaaaacagacacatagaccaatggaacagattagagagcccagaaataaagctgcacacctataaccatctgatctttgacaaagttgacaaaaataagcaatgggaaaaggactccctatgtaacaaatgatgttgggataactagctagccatatgcagaagaatgaaactgaaccccaacttttcaccatacataa

SEQ ID NO: 346 - DNA, 118 bp, Homo sapiens; identical to SEQ ID NO: 281

SEQ ID NO: 347 - DNA, 195 bp, Homo sapiens
  SITE (159): n equals a,t,g, or c
  SITE (164): n equals a,t,g, or c
  SITE (166): n equals a,t,g, or c
  SITE (193): n equals a,t,g, or c
tgttatccgttcacaattccacacaacatacgagccggaagcataaagtgtaaagcctggggtgcctaatgagtgagctaactcacattaattgcgttgcgctcactgcccgctttccagtcgggaaacctgtcgtgccagctgcattaatgaattggncaacncncggggagaggcggtttgcgtattgggngc

SEQ ID NO: 348 - DNA, 77 bp, Homo sapiens; identical to SEQ ID NO: 270
